(19) United States
(12) Patent Application Publication
(10) Pub. No.: US 2024/0200138 A1
(43) Pub. Date: Jun. 20, 2024

(54) Target-Enriched Multiplexed Parallel Analysis For Assessment Of Risk For Genetic Conditions

(71) Applicant: NIPD GENETICS PUBLIC COMPANY LIMITED, Nicosia (CY)

(72) Inventors: George Koumbaris, Lithrodontas (CY); Marios Ioannides, Nicosia (CY); Kyriakos Tsangaras, Limassol (CY); Charalambos Loizides, Nicosia (CY); Michalis Nicolaou, Nicosia (CY); Skevi Kyriakou, Larnaca (CY); Philippos Patsalis, Nicosia (CY); Elena Kypri, Nico (CY)

(21) Appl. No.: 18/398,421

(22) Filed: Dec. 28, 2023

Related U.S. Application Data
(63) Continuation of application No. 16/625,440, filed on Dec. 20, 2019, now Pat. No. 11,879,157.
(60) Provisional application No. 62/529,785, filed on Jul. 7, 2017.

(51) Int. Cl. C12Q 1/6883; C12Q 1/6874

(52) U.S. Cl. CPC C12Q 1/6883; C12Q 1/6874; C12Q 2600/112; C12Q 2600/118

(57) ABSTRACT

The invention provides methods for assessment of risk for genetic conditions using target-enriched multiplexed parallel analysis, for example fetal risk for genetic conditions in prenatal testing. The methods of the invention utilize TArget Capture Sequences (TACS) to thereby enrich for target sequences of interest, followed by massive parallel sequencing and statistical analysis of the enriched population. The methods of the disclosure can be used to determine carrier status of inheritable genetic abnormalities associated with genetic conditions and from this information the fetal risk of inheriting the genetic condition can be determined. Kits for carrying out the methods of the invention are also provided.

### CROSS REFERENCE TO RELATED PATENT APPLICATIONS

[0001] This application is a continuation of U.S. patent application Ser. No. 16/625,440, which was filed on Dec. 20, 2019, and is a U.S. national phase application of International Application No. PCT/EP2018/068431, which was filed on Jul. 6, 2018, and claims priority to U.S. Provisional Application No. 62/529,785, which was filed on Jul. 7, 2017. The content of these earlier filed applications is hereby incorporated by reference herein in its entirety.

### INCORPORATION OF THE SEQUENCE LISTING

[0002] The present application contains a sequence listing that was submitted herewith in XML format via Patent Center, containing the file name “37578_0072 U2_SL.xml” which is 2,240,512 bytes in size, created on Dec. 28, 2023 and is herein incorporated by reference in its entirety pursuant to 37 C.F.R. § 1.52(e).

### FIELD OF THE INVENTION

[0003] The invention is in the field of biology, medicine and chemistry, more in particular in the field of molecular biology and more in particular in the field of molecular diagnostics.

### BACKGROUND OF THE INVENTION

[0004] The discovery of free fetal DNA (ffDNA) in maternal circulation (Lo, Y. M. et al. (1997) Lancet 350:485-487) was a landmark towards the development of non-invasive prenatal testing for chromosomal abnormalities and has opened up new possibilities in the clinical setting. However, direct analysis of the limited amount of ffDNA in the presence of an excess of maternal DNA is a great challenge for Non-Invasive Prenatal Testing (NIPT) of chromosomal abnormalities. The implementation of next generation sequencing (NGS) technologies in the development of NIPT has revolutionized the field. In 2008, two independent groups demonstrated that NIPT of trisomy 21 could be achieved using next generation massively parallel shotgun sequencing (MPSS) (Chiu, R. W. et al. (2008) Proc. Natl. Acad. Sci. USA 105:20458-20463; Fan, H. C. et al. (2008) Proc. Natl. Acad. Sci. USA 105:16266-162710). The new era of NIPT for chromosomal abnormalities has opened new possibilities for the implementation of these technologies into clinical practice. Biotechnology companies that are partly or wholly dedicated to the development of NIPT tests have initiated large-scale clinical studies towards their implementation (Palomaki, G. E. et al. (2011) Genet. Med. 13:913-920; Ehrich, M. et al. (2011) Am. J. Obstet. Gynecol. 204:205e1-11; Chen, E. Z. et al. (2011) PLOS One 6:e21791; Sehnert, A. J. et al. (2011) Clin. Chem. 57:1042-1049; Palomaki, G. E. et al. (2012); Genet. Med. 14:296-305; Bianchi, D. W. et al. (2012) Obstet. Gynecol. 119:890-901; Zimmerman, B. et al. (2012) Prenat. Diag. 32:1233-1241; Nicolaides, K. H. et al. (2013) Prenat. Diagn. 33:575-579; Sparks, A. B. et al. (2012) Prenat. Diagn. 32:3-9).

[0005] Initial NIPT approaches used massively parallel shotgun sequencing (MPSS) NGS methodologies (see e.g., U.S. Pat. Nos. 7,888,017; 8,008,018; 8,195,415; 8,296,076; 8,682,594; US Patent Publication 20110201507; US Patent Publication 20120270739). Thus, these approaches are whole genome-based, in which the entire maternal sample containing both maternal DNA and free fetal DNA is subjected to amplification, sequencing and analysis.

[0006] More recently, targeted-based NGS approaches for NIPT, in which only specific sequences of interest are sequenced, have been developed. For example, a targeted NIPT approach using TArget Capture Sequences (TACS) for identifying fetal chromosomal abnormalities using a maternal blood sample has been described (PCT Publication WO 2016/189388; US Patent Publication 2016/0340733; Koumbaris, G. et al. (2016) Clinical chemistry, 62(6), pp. 848-855).

[0007] Such targeted approaches require significantly less sequencing than the MPSS approaches, since sequencing is only performed on specific loci on the target sequence of interest rather than across the whole genome. Additional methodologies for NGS-based approaches are still needed, in particular approaches that can target specific sequences of interest, thereby greatly reducing the amount of sequencing needed as compared to whole genome-based approaches, as well as increasing the read-depth of regions of interest, thus enabling detection of low signal to noise ratio regions. In particular, additional methodologies are still needed that allow for genetic aberrations present in diminutive amounts in a sample can be reliably detected. Furthermore, methods that allow for both assessment of fetal genetic aberrations as well assessment of fetal risk of inheriting a genetic condition(s) are still needed.

### SUMMARY OF THE INVENTION

[0008] This invention provides improved methods for enriching targeted genomic regions of interest to be analyzed by multiplexed parallel sequencing, wherein the methods allow for assessment of fetal risk of inherited genetic conditions. The methods can further allow for assessment of fetal risk of a genetic abnormality at a chromosome(s) of interest. Thus, the methods of the invention provide the ability to simultaneously assess fetal risk of inherited genetic conditions and fetal risk of genetic abnormalities in a single sample containing fetal DNA. The methods utilize a sample comprising maternal and fetal DNA and fetal risk of inherited genetic conditions is assessed by determining maternal carrier status at loci of interest associated with different genetic conditions, as well as determining paternal carrier status for those diseases in which there is a positive maternal carrier status.

[0009] Accordingly, in one aspect the invention pertains to a method of determining fetal risk of inheriting a genetic condition, the method comprising:
[0010] (a) preparing a sequencing library from a sample comprising maternal and fetal DNA;
[0011] (b) hybridizing the sequencing library to a pool of double-stranded TArget Capture Sequences (TACS), wherein the pool of TACS comprises a plurality of sequences that bind to genomic regions of interest including variant allele loci of interest associated with different genetic conditions;
[0012] (c) isolating members of the sequencing library that bind to the pool of TACS to obtain an enriched library;
[0013] (d) amplifying and sequencing the enriched library;
[0014] (e) performing statistical analysis on the enriched library sequences to thereby determine maternal carrier status at the loci of interest associated with different genetic conditions, wherein for a sample with a positive maternal carrier status, the method further comprises:
[0015] (f) obtaining a paternal DNA sample and performing steps (a)-(e) on the paternal DNA sample to determine paternal carrier status for those diseases in which there is a positive maternal carrier status; and
[0016] (g) determining fetal risk of inheriting a genetic condition based on maternal carrier status and, when (f) is performed, paternal carrier status.

[0017] In one embodiment:
[0018] (i) each member sequence within the pool of TACS is between 100-500 base pairs in length, each member sequence having a 5′ end and a 3′ end;
[0019] (ii) each member sequence binds to the same genomic sequence of interest at least 50 base pairs away, on both the 5′ end and the 3′ end, from regions harboring Copy Number Variations (CNVs), Segmental duplications or repetitive DNA elements; and
[0020] (iii) the GC content of the pool of TACS is between 19% and 80%, as determined by calculating the GC content of each member within the pool of TACS.

[0021] In one embodiment, the sample is a maternal plasma sample.

[0022] In one embodiment, the pool of TACS comprises members that bind to chromosomes 1-22, X and Y of the human genome. In one embodiment, each member sequence within the pool of TACS is at least 160 base pairs in length. In certain embodiments, the GC content of the pool of TACS is between 19% and 80% or is between 19% and 46%. Alternative % ranges for the GC content of the pool of TACS are described herein.

[0023] In one embodiment, the pool of TACS comprises a plurality of TACS families, wherein each member of a TACS family binds to the same target sequence of interest but with different start/stop positions on the sequence with respect to a reference coordinate system (i.e., binding of TACS family members to the target sequence is staggered) to thereby enrich for target sequences of interest, followed by massive parallel sequencing and statistical analysis of the enriched population. The use of families of TACS with the TACS pool that bind to each target sequence of interest, as compared to use of a single TACS within the TACS pool that binds to each target sequence of interest, significantly increases enrichment for the target sequences of interest, as evidenced by a greater than 50% average increase in read-depth for the family of TACS versus a single TACS.

[0024] Accordingly, in one embodiment, the pool of TACS comprises a plurality of TACS families directed to different genomic sequences of interest, wherein each TACS family comprises a plurality of member sequences, wherein each member sequence binds to the same genomic sequence of interest but has different start and/or stop positions with respect to a reference coordinate system for the genomic sequence of interest.

[0025] In certain embodiments, each TACS family comprises at least 3 member sequences or at least 5 member sequences. Alternative numbers of member sequences in each TACS family are described herein. In one embodiment, the pool of TACS comprises at least 50 different TACS families. Alternative numbers of different TACS families within the pool of TACS are described herein. In certain embodiments, the start and/or stop positions for the member sequences within a TACS family, with respect to a reference coordinate system for the genomic sequence of interest, are staggered by at least 3 base pairs or by at least 10 base pairs. Alternative lengths (sizes) for the number of base pairs within the stagger are described herein.

[0026] In one embodiment, the variant allele loci of interest are associated with genetic conditions selected from the group of Achondroplasia, Alpha-1 Antitrypsin Deficiency, Antiphospholipid Syndrome, Autism, Autosomal Dominant Polycystic Kidney Disease, Autosomal Recessive Polycystic Kidney Disease, Inheritable Breast Cancer Gene, Charcot-Marie-Tooth, Inheritable Colon Cancer Gene, Crohn's Disease, Cystic Fibrosis, Dercum Disease, Duane Syndrome, Duchenne Muscular Dystrophy, Factor V Leiden Thrombophilia, Familial Hypercholesterolemia, Familial Mediterranean Fever, Fragile X Syndrome, Gaucher Disease, Hemochromatosis, Hemophilia, Holoprosencephaly, Huntington's Disease, Marfan Syndrome, Myotonic Dystrophy, Neurofibromatosis, Noonan Syndrome, Osteogenesis Imperfecta, Phenylketonuria, Poland Anomaly, Porphyria, Prostate Cancer, Retinitis Pigmentosa, Severe Combined Immunodeficiency (SCID), Sickle Cell Disease, Spinal Muscular Atrophy, Tay-Sachs, Thalassemia, WAGR Syndrome, Wilson Disease, and combinations thereof.

[0027] In another embodiment, the variant allele loci of interest are associated with genetic conditions selected from the group of Abetalipoproteinemia; Arthrogryposis Mental Retardation Seizures; Autosomal recessive polycystic kidney disease; Bardet Biedl syndrome 12; Beta thalassemia; Canavan disease; Choreacanthocytosis; Crigler Najjar syndrome, Type I; Cystic fibrosis; Factor V Leiden thrombophilia; Factor XI deficiency; Familial dysautonomia; Familial Mediterranean fever; Fanconi anemia (FANCG-related); Glycine encephalopathy (GLDC-related); Glycogen storage disease, Type 3; Glycogen storage disease, Type 7; GRACILE Syndrome; Inclusion body myopathy, Type 2; Isovaleric acidemia; Joubert syndrome, Type 2; Junctional epidermolysis bullosa, Herlitz type; Leber congenital amaurosis (LCA5-related); Leydig cell hypoplasia [Luteinizing Hormone Resistance]; Limb girdle muscular dystrophy, Type 2E; Lipoamide Dehydrogenase Deficiency [Maple syrup urine disease, Type 3]; Lipoprotein lipase deficiency; Long chain 3-hydroxyacyl-CoA dehydrogenase deficiency; Maple syrup urine disease, Type 1B; Methylmalonic acidemia (MMAA-related); Multiple sulfatase deficiency; Navajo neurohepatopathy [MPV17-related hepatocerebral mitochondrial DNA depletion syndrome]; Neuronal ceroid lipofuscinosis (MFSD8-related); Nijmegen breakage syndrome; Ornithine translocase deficiency [Hyperornithinemia-Hyperammonemia-Homocitrullinuria (HHH) Syndrome]; Peroxisome biogenesis disorders Zellweger syndrome spectrum (PEX1-related); Peroxisome biogenesis disorders Zellweger syndrome spectrum (PEX2-related); Phenylketonurea; Pontocerebellar hypoplasia, Type 2E; Pycnodysostosis; Pyruvate dehydrogenase deficiency (PDHB-related); Retinal Dystrophy (RLBP1-related) [Bothnia retinal dystrophy]; Retinitis pigmentosa (DHDDS-related); Sanfilippo syndrome, Type D [Mucopolysaccharidosis IIID]; Sickle-cell disease; Sjögren-Larsson syndrome; Tay-Sachs disease; Usher syndrome, Type 1F; 3 Methylcrotonyl CoA Carboxylase Deficiency 1; 3 Methylcrotonyl CoA Carboxylase Deficiency 2, and combinations thereof.

[0028] In one embodiment, the pool of TACS further comprises sequences that bind to chromosomes of interest for detecting fetal genetic abnormalities and step (e) further comprises performing statistical analysis on the enriched library sequences to thereby determine fetal risk of a genetic abnormality at the chromosome of interest. In one embodiment, the genetic abnormality is a chromosomal aneuploidy. In one embodiment, the chromosomes of interest include chromosomes 13, 18, 21, X and Y. In one embodiment, the genetic abnormality is a structural abnormality, including but not limited to copy number changes including microdeletions and microduplications, insertions, deletions, translocations, inversions and small-size mutations including point mutations.

[0029] In one embodiment, the pool of TACS is fixed to a solid support. For example, in one embodiment, the TACS are biotinylated and are bound to streptavidin-coated magnetic beads.

[0030] In one embodiment, amplification of the enriched library is performed in the presence of blocking sequences that inhibit amplification of wild-type sequences.

[0031] In one embodiment, members of the sequencing library that bind to the pool of TACS are partially complementary to the TACS.

[0032] In one embodiment, the statistical analysis comprises a score-based classification system. In on embodiment, sequencing of the enriched library provides a read-depth for the genomic sequences of interest and read-depths for reference loci and the statistical analysis comprises applying an algorithm that tests sequentially the read-depth of the loci of from the genomic sequences of interest against the read-depth of the reference loci, the algorithm comprising steps for: (a) removal of inadequately sequenced loci; (b) GC-content bias alleviation; and (c) ploidy status determination. In one embodiment, GC-content bias is alleviated by grouping together loci of matching GC content. In one embodiment, sequencing of the enriched library provides the number and size of sequenced fragments for TACS-specific coordinates and the statistical analysis comprises applying an algorithm that tests sequentially the fragment-size proportion for the genomic sequence of interest against the fragment-size proportion of the reference loci, the algorithm comprising steps for: (a) removal of fragment-size outliers; (b) fragment-size proportion calculation; and (c) ploidy status determination.

[0033] In another aspect, the invention pertains to a method of determining fetal risk of inheriting a genetic condition, the method comprising:
[0034] (a) preparing a sequencing library from a sample comprising maternal and fetal DNA;
[0035] (b) hybridizing the sequencing library to a pool of double-stranded TArget Capture Sequences (TACS), wherein the pool of TACS comprises a plurality of TACS families directed to different genomic sequences of interest, wherein each TACS family comprises a plurality of member sequences, wherein each member sequence binds to the same genomic sequence of interest but has different start and/or stop positions with respect to a reference coordinate system for the genomic sequence of interest, and further wherein:
   [0036] (i) each member sequence within each TACS family is between 100-500 base pairs in length, each member sequence having a 5′ end and a 3′ end;
   [0037] (ii) each member sequence binds to the same genomic sequence of interest at least 50 base pairs away, on both the 5′ end and the 3′ end, from regions harboring Copy Number Variations (CNVs), Segmental duplications or repetitive DNA elements; and
   [0038] (iii) the GC content of the pool of TACS is between 19% and 80%, as determined by calculating the GC content of each member within each family of TACS;
[0039] (c) isolating members of the sequencing library that bind to the pool of TACS to obtain an enriched library;
[0040] (d) amplifying and sequencing the enriched library; and
[0041] (e) performing statistical analysis on the enriched library sequences to thereby determine maternal carrier status at the loci of interest associated with different genetic conditions, wherein for a sample with a positive maternal carrier status, the method further comprises:
[0042] (f) obtaining a paternal DNA sample and performing steps (a)-(e) on the paternal DNA sample to determine paternal carrier status for those diseases in which there is a positive maternal carrier status; and
[0043] (g) determining fetal risk of inheriting a genetic condition based on maternal carrier status and, when (f) is performed, paternal carrier status.

[0044] In yet another aspect, the invention pertains to a method of determining the status of a genetic condition, the method comprising:
[0045] (a) preparing a sequencing library from a sample of DNA;
[0046] (b) hybridizing the sequencing library to a pool of TArget Capture Sequences (TACS), wherein the pool of TACS comprises a plurality of sequences that bind to genomic sequences of interest including variant allele loci of interest associated with different genetic conditions, wherein:
   [0047] (i) each member sequence within the pool of TACS is between 100-500 base pairs in length, each member sequence having a 5′ end and a 3′ end;
   [0048] (ii) each member sequence binds to the same genomic sequence of interest at least 50 base pairs away, on both the 5′ end and the 3′ end, from regions harboring Copy Number Variations (CNVs), Segmental duplications or repetitive DNA elements; and
   [0049] (iii) the GC content of the pool of TACS is between 19% and 80%, as determined by calculating the GC content of each member within the pool of TACS.
[0050] (c) isolating members of the sequencing library that bind to the pool of TACS to obtain an enriched library;
[0051] (d) amplifying and sequencing the enriched library;
[0052] (e) performing statistical analysis on the enriched library sequences to thereby determine the carrier status at the loci of interest associated with different genetic conditions.

[0053] In another aspect, kits for performing the methods of the invention are also encompassed.

### BRIEF DESCRIPTION OF THE FIGURES

[0054] The patent or application file contains at least one drawing executed in color. Copies of this patent or patent application publication with color drawing(s) will be provided by the Office upon request and payment of the necessary fee.

[0055] FIG. 1 is a schematic diagram of multiplexed parallel analysis of targeted genomic regions for non-invasive prenatal testing using TArget Capture Sequences (TACS).

[0056] FIGS. 2A-2BBBB depict a listing of exemplary chromosomal regions for amplifying TACS that bind to for example chromosomes 13 (FIGS. 2A-2T), 18 (FIGS. 2CCC-2BBBB), 21 (FIGS. 2LL-2CCC) or X (FIGS. 2U-2LL). A more extensive list is shown in Table 1 below.

[0057] FIG. 3 is a schematic diagram of TACS-based enrichment of a sequence of interest (bold line) using a single TACS (left) versus TACS-based enrichment using a family of TACS (right).

[0058] FIGS. 4A-4B are graphs showing enrichment using families of TACS versus a single TACS, as illustrated by increase in the average read-depth. FIG. 4A shows loci enriched using a family of TACS (red dots) as compared to loci enriched using a single TACS (blue dots), with different target sequences shown on the x-axis and the fold change in read-depth shown on the y-axis. FIG. 4B is a bar graph illustrating the average fold-increase in read-depth (54.7%) using a family of TACS (right) versus a single TACS (left).

[0059] FIGS. 5A-B depict a plot graph illustrating minor allele frequencies (MAFs) of various loci associated with the indicated genetic conditions, as computed from a mixed sample containing maternal and fetal DNA. The x-axis is an index of samples. The y-axis shows the % MAF. The MAF value is dependent on the maternal fraction present in the mixed sample. MAF values above a certain threshold (not shown here) imply the presence of a genetic condition in the maternal sample (i.e., the maternal sample is assigned as a maternal carrier) (FIG. 5A). cfDNA obtained from 1199 pregnancy samples and DNA from the biological father for each sample were subjected to in-solution targeted enrichment, using TACS, followed by NGS. The results show a total of 325 mutations that were identified in 266 pregnant samples, 78 of which were unique pathogenic mutations (FIG. 5B).

[0060] In the same dataset trisomy 21 (T21) was detected in 11 samples, trisomy 18 (T18) was detected in two samples, trisomy 13 (T13) was detected in one sample, sex chromosomal abnormalities (SCA) were detected in two samples and microdeletions (MD) in 4 samples. All aneuploidies, SCA and MD (20/20) were confirmed by karyotyping or arrayCGH.

[0061] FIG. 6 is a dot plot graph showing results of a fragments-based test for detecting increased numbers of smaller-size fragments in a mixed sample. An abnormal, aneuploid sample, with an estimated fetal fraction of 2.8%, was correctly detected using this method. The black dots are individual samples. The x-axis shows the sample index. The y-axis shows the score result of the fragments-size based method. A score result greater than the threshold shown by the grey line indicates a deviation from the expected size of fragments illustrating the presence of aneuploidy.

[0062] FIGS. 7 to 12 disclose graphs from the experiments as shown herein.

[0063] Table 1 below shows preferred and exemplary TACS positions.

| Chr. | Start | Stop | GC content | Condition |
|---|---|---|---|---|
| chr1 | 26764610 | 26764830 | 0.514 | Retinitis pigmentosa DHDDS related |
| chr1 | 100316484 | 100316734 | 0.340 | Glycogen storage disease type 3 |
| chr1 | 100316495 | 100316745 | 0.348 | Glycogen storage disease type 3 |
| chr1 | 100340820 | 100341070 | 0.344 | Glycogen storage disease type 3 |
| chr1 | 100341945 | 100342195 | 0.340 | Glycogen storage disease type 3 |
| chr1 | 100341965 | 100342215 | 0.352 | Glycogen storage disease type 3 |
| chr1 | 100346760 | 100347010 | 0.380 | Glycogen storage disease type 3 |
| chr1 | 100350043 | 100350293 | 0.336 | Glycogen storage disease type 3 |
| chr1 | 100350098 | 100350298 | 0.370 | Glycogen storage disease type 3 |
| chr1 | 100366153 | 100366383 | 0.413 | Glycogen storage disease type 3 |
| chr1 | 100368202 | 100368462 | 0.369 | Glycogen storage disease type 3 |
| chr1 | 100378968 | 100379228 | 0.304 | Glycogen storage disease type 3 |
| chr1 | 100379008 | 100379188 | 0.317 | Glycogen storage disease type 3 |
| chr1 | 100379013 | 100379213 | 0.340 | Glycogen storage disease type 3 |
| chr1 | 100381830 | 100382080 | 0.280 | Glycogen storage disease type 3 |
| chr1 | 100381939 | 100382189 | 0.292 | Glycogen storage disease type 3 |
| chr1 | 100382143 | 100382393 | 0.356 | Glycogen storage disease type 3 |
| chr1 | 100476839 | 100477099 | 0.342 | Arthrogryposis Mental Retardation Seizures |
| chr1 | 100476868 | 100477058 | 0.337 | Arthrogryposis Mental Retardation Seizures |
| chr1 | 150769145 | 150769405 | 0.462 | Pycnodysostosis |
| chr1 | 150769182 | 150769352 | 0.488 | Pycnodysostosis |
| chr1 | 169518919 | 169519179 | 0.423 | Factor V Leiden thrombophilia |
| chr1 | 183184472 | 183184732 | 0.508 | Junctional epidermolysis bullosa Herlitz type |
| chr1 | 183184492 | 183184752 | 0.519 | Junctional epidermolysis bullosa Herlitz type |
| chr2 | 26417929 | 26418179 | 0.504 | Long chain 3 hydroxyacyl CoA |
| | | | | dehydrogenase deficiency |
| chr2 | 26426889 | 26427149 | 0.462 | Long chain 3 hydroxyacyl CoA |
| | | | | dehydrogenase deficiency |
| chr2 | 26426904 | 26427134 | 0.487 | Long chain 3 hydroxyacyl CoA |
| | | | | dehydrogenase deficiency |
| chr2 | 27535794 | 27536004 | 0.567 | Navajo neurohepatopathy MPV17 related |
| | | | | hepatocerebral mitochondrial DNA depletion |
| | | | | syndrome |
| chr2 | 48914965 | 48915215 | 0.380 | Leydig cell hypoplasia Luteinizing Hormone |
| | | | | Resistance |
| chr2 | 48915152 | 48915402 | 0.388 | Leydig cell hypoplasia Luteinizing Hormone |
| | | | | Resistance |
| chr2 | 48915307 | 48915557 | 0.428 | Leydig cell hypoplasia Luteinizing Hormone |
| | | | | Resistance |
| chr2 | 48915780 | 48916040 | 0.412 | Leydig cell hypoplasia Luteinizing Hormone |
| | | | | Resistance |
| chr2 | 48950704 | 48950954 | 0.372 | Leydig cell hypoplasia Luteinizing Hormone |
| | | | | Resistance |
| chr2 | 219525688 | 219525938 | 0.576 | GRACILE syndrome |
| chr2 | 219525751 | 219526001 | 0.580 | GRACILE syndrome |
| chr2 | 219525833 | 219526083 | 0.532 | GRACILE syndrome |
| chr2 | 219525881 | 219526131 | 0.504 | GRACILE syndrome |
| chr2 | 219526345 | 219526595 | 0.548 | GRACILE syndrome |
| chr2 | 219526444 | 219526694 | 0.536 | GRACILE syndrome |
| chr2 | 219526446 | 219526696 | 0.536 | GRACILE syndrome |
| chr2 | 234669321 | 234669571 | 0.552 | Crigler Najjar syndrome Type I |
| chr2 | 234669332 | 234669582 | 0.556 | Crigler Najjar syndrome Type I |
| chr2 | 234669649 | 234669899 | 0.440 | Crigler Najjar syndrome Type I |
| chr2 | 234675613 | 234675863 | 0.372 | Crigler Najjar syndrome Type I |
| chr2 | 234676394 | 234676644 | 0.440 | Crigler Najjar syndrome Type I |
| chr2 | 234676429 | 234676609 | 0.456 | Crigler Najjar syndrome Type I |
| chr2 | 234676443 | 234676693 | 0.428 | Crigler Najjar syndrome Type I |
| chr2 | 234676780 | 234677030 | 0.484 | Crigler Najjar syndrome Type I |
| chr3 | 4490882 | 4491132 | 0.396 | Multiple sulfatase deficiency |
| chr3 | 58413682 | 58413942 | 0.408 | Pyruvate dehydrogenase deficiency PDHB |
| | | | | related |
| chr3 | 58416448 | 58416708 | 0.492 | Pyruvate dehydrogenase deficiency PDHB |
| | | | | related |
| chr3 | 58416463 | 58416723 | 0.488 | Pyruvate dehydrogenase deficiency PDHB |
| | | | | related |
| chr3 | 165491155 | 165491404 | 0.313 | Butyrylcholinesterase deficiency |
| chr3 | 165548392 | 165548641 | 0.402 | Butyrylcholinesterase deficiency |
| chr3 | 182756751 | 182757011 | 0.469 | 3 Methylcrotonyl CoA Carboxylase |
| | | | | Deficiency 1 |
| chr3 | 182756773 | 182756943 | 0.506 | 3 Methylcrotonyl CoA Carboxylase |
| | | | | Deficiency 1 |
| chr3 | 182759343 | 182759593 | 0.464 | 3 Methylcrotonyl CoA Carboxylase |
| | | | | Deficiency 1 |
| chr4 | 52894936 | 52895196 | 0.312 | Limb girdle muscular dystrophy type 2E |
| chr4 | 52895808 | 52896058 | 0.420 | Limb girdle muscular dystrophy type 2E |
| chr4 | 52895823 | 52896043 | 0.427 | Limb girdle muscular dystrophy type 2E |
| chr4 | 100543788 | 100544038 | 0.420 | Abetalipoproteinemia |
| chr4 | 123663257 | 123663507 | 0.360 | Bardet Biedl syndrome 12 |
| chr4 | 123663787 | 123664037 | 0.392 | Bardet Biedl syndrome 12 |
| chr4 | 123663985 | 123664235 | 0.408 | Bardet Biedl syndrome 12 |
| chr4 | 123664405 | 123664655 | 0.436 | Bardet Biedl syndrome 12 |
| chr4 | 128851825 | 128852085 | 0.315 | Neuronal ceroid lipofuscinosis MFSD8 |
| | | | | related |
| chr4 | 128859841 | 128860031 | 0.300 | Neuronal ceroid lipofuscinosis MFSD8 |
| | | | | related |
| chr4 | 146560230 | 146560480 | 0.436 | Methylmalonic acidemia MMAA related |
| chr4 | 146560327 | 146560577 | 0.396 | Methylmalonic acidemia MMAA related |
| chr4 | 146560432 | 146560682 | 0.404 | Methylmalonic acidemia MMAA related |
| chr4 | 146560450 | 146560700 | 0.396 | Methylmalonic acidemia MMAA related |
| chr4 | 146560519 | 146560769 | 0.372 | Methylmalonic acidemia MMAA related |
| chr4 | 146560579 | 146560829 | 0.356 | Methylmalonic acidemia MMAA related |
| chr4 | 146563453 | 146563703 | 0.400 | Methylmalonic acidemia MMAA related |
| chr4 | 146563507 | 146563757 | 0.436 | Methylmalonic acidemia MMAA related |
| chr4 | 146567088 | 146567338 | 0.380 | Methylmalonic acidemia MMAA related |
| chr4 | 146567195 | 146567445 | 0.352 | Methylmalonic acidemia MMAA related |
| chr4 | 146576280 | 146576530 | 0.476 | Methylmalonic acidemia MMAA related |
| chr4 | 187195222 | 187195472 | 0.476 | Factor XI deficiency |
| chr4 | 187201287 | 187201537 | 0.512 | Factor XI deficiency |
| chr5 | 70895369 | 70895629 | 0.369 | 3 Methylcrotonyl CoA Carboxylase |
| | | | | Deficiency 2 |
| chr5 | 70895399 | 70895599 | 0.370 | 3 Methylcrotonyl CoA Carboxylase |
| | | | | Deficiency 2 |
| chr5 | 70898324 | 70898574 | 0.408 | 3 Methylcrotonyl CoA Carboxylase |
| | | | | Deficiency 2 |
| chr5 | 70900130 | 70900350 | 0.364 | 3 Methylcrotonyl CoA Carboxylase |
| | | | | Deficiency 2 |
| chr5 | 70927898 | 70928128 | 0.396 | 3 Methylcrotonyl CoA Carboxylase |
| | | | | Deficiency 2 |
| chr5 | 70930689 | 70930919 | 0.352 | 3 Methylcrotonyl CoA Carboxylase |
| | | | | Deficiency 2 |
| chr5 | 70930869 | 70931139 | 0.378 | 3 Methylcrotonyl CoA Carboxylase |
| | | | | Deficiency 2 |
| chr5 | 70944892 | 70945142 | 0.468 | 3 Methylcrotonyl CoA Carboxylase |
| | | | | Deficiency 2 |
| chr6 | 51524100 | 51524284 | 0.429 | Autosomal recessive polycystic kidney |
| | | | | disease |
| chr6 | 51524387 | 51524577 | 0.453 | Autosomal recessive polycystic kidney |
| | | | | disease |
| chr6 | 51524477 | 51524726 | 0.418 | Autosomal recessive polycystic kidney |
| | | | | disease |
| chr6 | 51524630 | 51524870 | 0.333 | Autosomal recessive polycystic kidney |
| | | | | disease |
| chr6 | 51524642 | 51524812 | 0.347 | Autosomal recessive polycystic kidney |
| | | | | disease |
| chr6 | 51612557 | 51612806 | 0.454 | Autosomal recessive polycystic kidney |
| | | | | disease |
| chr6 | 51612759 | 51613008 | 0.414 | Autosomal recessive polycystic kidney |
| | | | | disease |
| chr6 | 51613242 | 51613431 | 0.476 | Autosomal recessive polycystic kidney |
| | | | | disease |
| chr6 | 51617943 | 51618148 | 0.463 | Autosomal recessive polycystic kidney |
| | | | | disease |
| chr6 | 51637377 | 51637626 | 0.357 | Autosomal recessive polycystic kidney |
| | | | | disease |
| chr6 | 51712574 | 51712767 | 0.492 | Autosomal recessive polycystic kidney |
| | | | | disease |
| chr6 | 51768264 | 51768495 | 0.468 | Autosomal recessive polycystic kidney |
| | | | | disease |
| chr6 | 51768323 | 51768528 | 0.449 | Autosomal recessive polycystic kidney |
| | | | | disease |
| chr6 | 51824498 | 51824736 | 0.391 | Autosomal recessive polycystic kidney |
| | | | | disease |
| chr6 | 51882183 | 51882367 | 0.484 | Autosomal recessive polycystic kidney |
| | | | | disease |
| chr6 | 51882240 | 51882489 | 0.522 | Autosomal recessive polycystic kidney |
| | | | | disease |
| chr6 | 51889261 | 51889460 | 0.432 | Autosomal recessive polycystic kidney |
| | | | | disease |
| chr6 | 51889530 | 51889709 | 0.430 | Autosomal recessive polycystic kidney |
| | | | | disease |
| chr6 | 51889613 | 51889863 | 0.488 | Autosomal recessive polycystic kidney |
| | | | | disease |
| chr6 | 51890671 | 51890920 | 0.566 | Autosomal recessive polycystic kidney |
| | | | | disease |
| chr6 | 51890681 | 51890931 | 0.576 | Autosomal recessive polycystic kidney |
| | | | | disease |
| chr6 | 51890721 | 51890971 | 0.576 | Autosomal recessive polycystic kidney |
| | | | | disease |
| chr6 | 51890762 | 51891012 | 0.552 | Autosomal recessive polycystic kidney |
| | | | | disease |
| chr6 | 51892991 | 51893208 | 0.562 | Autosomal recessive polycystic kidney |
| | | | | disease |
| chr6 | 51907748 | 51907997 | 0.378 | Autosomal recessive polycystic kidney |
| | | | | disease |
| chr6 | 51910894 | 51911114 | 0.414 | Autosomal recessive polycystic kidney |
| | | | | disease |
| chr6 | 51913211 | 51913461 | 0.504 | Autosomal recessive polycystic kidney |
| | | | | disease |
| chr6 | 51913231 | 51913481 | 0.508 | Autosomal recessive polycystic kidney |
| | | | | disease |
| chr6 | 51913232 | 51913482 | 0.508 | Autosomal recessive polycystic kidney |
| | | | | disease |
| chr6 | 51914850 | 51915048 | 0.545 | Autosomal recessive polycystic kidney |
| | | | | disease |
| chr6 | 51914920 | 51915167 | 0.538 | Autosomal recessive polycystic kidney |
| | | | | disease |
| chr6 | 51923055 | 51923235 | 0.522 | Autosomal recessive polycystic kidney |
| | | | | disease |
| chr6 | 51923055 | 51923268 | 0.535 | Autosomal recessive polycystic kidney |
| | | | | disease |
| chr6 | 51927226 | 51927475 | 0.474 | Autosomal recessive polycystic kidney |
| | | | | disease |
| chr6 | 51935792 | 51936041 | 0.410 | Autosomal recessive polycystic kidney |
| | | | | disease |
| chr6 | 51944632 | 51944881 | 0.466 | Autosomal recessive polycystic kidney |
| | | | | disease |
| chr6 | 51947894 | 51948003 | 0.404 | Autosomal recessive polycystic kidney |
| | | | | disease |
| chr6 | 80197215 | 80197465 | 0.376 | Leber congenital amaurosis LCA5 related |
| chr6 | 80198757 | 80199007 | 0.376 | Leber congenital amaurosis LCA5 related |
| chr6 | 80203229 | 80203479 | 0.308 | Leber congenital amaurosis LCA5 related |
| chr6 | 80878587 | 80878757 | 0.476 | Maple syrup urine disease type 1B |
| chr6 | 80910645 | 80910835 | 0.442 | Maple syrup urine disease type 1B |
| chr6 | 80912707 | 80912957 | 0.372 | Maple syrup urine disease type 1B |
| chr6 | 80982770 | 80982970 | 0.360 | Maple syrup urine disease type 1B |
| chr6 | 81053341 | 81053571 | 0.396 | Maple syrup urine disease type 1B |
| chr7 | 92123686 | 92123936 | 0.372 | Peroxisome biogenesis disorders Zellweger |
| | | | | syndrome spectrum PEX1 related |
| chr7 | 92130708 | 92130968 | 0.438 | Peroxisome biogenesis disorders Zellweger |
| | | | | syndrome spectrum PEX1 related |
| chr7 | 92130756 | 92130996 | 0.404 | Peroxisome biogenesis disorders Zellweger |
| | | | | syndrome spectrum PEX1 related |
| chr7 | 92132375 | 92132625 | 0.336 | Peroxisome biogenesis disorders Zellweger |
| | | | | syndrome spectrum PEX1 related |
| chr7 | 107542660 | 107542910 | 0.356 | Lipoamide Dehydrogenase Deficiency |
| | | | | Maplesyrup urine disease Type 3 |
| chr7 | 107555821 | 107556081 | 0.331 | Lipoamide Dehydrogenase Deficiency |
| | | | | Maplesyrup urine disease Type 3 |
| chr7 | 107555826 | 107556076 | 0.328 | Lipoamide Dehydrogenase Deficiency |
| | | | | Maplesyrup urine disease Type 3 |
| chr7 | 107557622 | 107557872 | 0.408 | Lipoamide Dehydrogenase Deficiency |
| | | | | Maplesyrup urine disease Type 3 |
| chr7 | 107557669 | 107557919 | 0.432 | Lipoamide Dehydrogenase Deficiency |
| | | | | Maplesyrup urine disease Type 3 |
| chr7 | 107557724 | 107557974 | 0.460 | Lipoamide Dehydrogenase Deficiency |
| | | | | Maplesyrup urine disease Type 3 |
| chr7 | 107559423 | 107559663 | 0.350 | Lipoamide Dehydrogenase Deficiency |
| | | | | Maplesyrup urine disease Type 3 |
| chr7 | 107559527 | 107559787 | 0.327 | Lipoamide Dehydrogenase Deficiency |
| | | | | Maplesyrup urine disease Type 3 |
| chr7 | 117149047 | 117149297 | 0.324 | Cystic fibrosis |
| chr7 | 117170889 | 117171139 | 0.412 | Cystic fibrosis |
| chr7 | 117171034 | 117171284 | 0.380 | Cystic fibrosis |
| chr7 | 117171070 | 117171270 | 0.385 | Cystic fibrosis |
| chr7 | 117174290 | 117174550 | 0.335 | Cystic fibrosis |
| chr7 | 117174335 | 117174505 | 0.341 | Cystic fibrosis |
| chr7 | 117180175 | 117180361 | 0.457 | Cystic fibrosis |
| chr7 | 117180203 | 117180384 | 0.470 | Cystic fibrosis |
| chr7 | 117188736 | 117188906 | 0.388 | Cystic fibrosis |
| chr7 | 117199521 | 117199770 | 0.369 | Cystic fibrosis |
| chr7 | 117199607 | 117199796 | 0.354 | Cystic fibrosis |
| chr7 | 117227720 | 117227969 | 0.349 | Cystic fibrosis |
| chr7 | 117227791 | 117227987 | 0.357 | Cystic fibrosis |
| chr7 | 117230384 | 117230604 | 0.295 | Cystic fibrosis |
| chr7 | 117232148 | 117232398 | 0.372 | Cystic fibrosis |
| chr7 | 117242817 | 117243027 | 0.371 | Cystic fibrosis |
| chr7 | 117246704 | 117246954 | 0.292 | Cystic fibrosis |
| chr7 | 117267461 | 117267711 | 0.344 | Cystic fibrosis |
| chr7 | 117267636 | 117267886 | 0.428 | Cystic fibrosis |
| chr7 | 117279890 | 117280140 | 0.336 | Cystic fibrosis |
| chr7 | 117282492 | 117282741 | 0.394 | Cystic fibrosis |
| chr8 | 19811599 | 19811869 | 0.474 | Lipoprotein lipase deficiency |
| chr8 | 77895920 | 77896170 | 0.360 | Peroxisome biogenesis disorders Zellweger |
| | | | | syndrome spectrum PEX2 related |
| chr8 | 90983285 | 90983535 | 0.288 | Nijmegen breakage syndrome |
| chr9 | 6554576 | 6554826 | 0.520 | Glycine encephalopathy GLDC related |
| chr9 | 6588298 | 6588538 | 0.450 | Glycine encephalopathy GLDC related |
| chr9 | 35075151 | 35075401 | 0.484 | Fanconi anemia FANCG related |
| chr9 | 35076448 | 35076718 | 0.474 | Fanconi anemia FANCG related |
| chr9 | 35078487 | 35078717 | 0.535 | Fanconi anemia FANCG related |
| chr9 | 36217272 | 36217522 | 0.520 | Inclusion body myopathy type 2 |
| chr9 | 36219822 | 36220052 | 0.517 | Inclusion body myopathy type 2 |
| chr9 | 75671794 | 75672044 | 0.392 | Choreoacanthocytosis |
| chr9 | 111656227 | 111656457 | 0.287 | Familial dysautonomia |
| chr9 | 111656249 | 111656419 | 0.259 | Familial dysautonomia |
| chr9 | 111661976 | 111662216 | 0.333 | Familial dysautonomia |
| chr9 | 111662458 | 111662708 | 0.444 | Familial dysautonomia |
| chr10 | 56077044 | 56077304 | 0.488 | Usher syndrome type 1F |
| chr10 | 56423892 | 56424142 | 0.396 | Usher syndrome type 1F |
| chr11 | 5246784 | 5247034 | 0.496 | Beta thalassemia |
| chr11 | 5246784 | 5247034 | 0.496 | Sickle cell disease |
| chr11 | 5246805 | 5247019 | 0.519 | Beta thalassemia |
| chr11 | 5246805 | 5247019 | 0.519 | Sickle cell disease |
| chr11 | 5246862 | 5247067 | 0.493 | Beta thalassemia |
| chr11 | 5246862 | 5247067 | 0.493 | Sickle cell disease |
| chr11 | 5246865 | 5247108 | 0.465 | Beta thalassemia |
| chr11 | 5246865 | 5247108 | 0.465 | Sickle cell disease |
| chr11 | 5246956 | 5247165 | 0.373 | Beta thalassemia |
| chr11 | 5246988 | 5247238 | 0.352 | Beta thalassemia |
| chr11 | 5247008 | 5247258 | 0.340 | Beta thalassemia |
| chr11 | 5247020 | 5247210 | 0.342 | Beta thalassemia |
| chr11 | 5247686 | 5247936 | 0.488 | Beta thalassemia |
| chr11 | 5247686 | 5247936 | 0.488 | Sickle cell disease |
| chr11 | 5247726 | 5247976 | 0.500 | Beta thalassemia |
| chr11 | 5247726 | 5247976 | 0.500 | Sickle cell disease |
| chr11 | 5247727 | 5247977 | 0.504 | Beta thalassemia |
| chr11 | 5247727 | 5247977 | 0.504 | Sickle cell disease |
| chr11 | 5247849 | 5248045 | 0.541 | Beta thalassemia |
| chr11 | 5247849 | 5248045 | 0.541 | Sickle cell disease |
| chr11 | 5247863 | 5248085 | 0.532 | Beta thalassemia |
| chr11 | 5247863 | 5248085 | 0.532 | Sickle cell disease |
| chr11 | 5247979 | 5248198 | 0.511 | Beta thalassemia |
| chr11 | 5247979 | 5248198 | 0.511 | Sickle cell disease |
| chr11 | 5248052 | 5248302 | 0.500 | Beta thalassemia |
| chr11 | 5248052 | 5248302 | 0.500 | Sickle cell disease |
| chr11 | 5248053 | 5248303 | 0.500 | Beta thalassemia |
| chr11 | 5248053 | 5248303 | 0.500 | Sickle cell disease |
| chr11 | 5248073 | 5248323 | 0.496 | Beta thalassemia |
| chr11 | 5248073 | 5248323 | 0.496 | Sickle cell disease |
| chr11 | 5248145 | 5248333 | 0.511 | Beta thalassemia |
| chr11 | 5248145 | 5248333 | 0.511 | Sickle cell disease |
| chr11 | 5248265 | 5248515 | 0.536 | Beta thalassemia |
| chr11 | 61161308 | 61161568 | 0.400 | Joubert syndrome Type 2 |
| chr12 | 48524042 | 48524312 | 0.459 | Glycogen storage disease type 7 |
| chr12 | 48525048 | 48525308 | 0.481 | Glycogen storage disease type 7 |
| chr12 | 48526572 | 48526822 | 0.552 | Glycogen storage disease type 7 |
| chr12 | 65116744 | 65116994 | 0.452 | Sanfilippo syndrome type D |
| | | | | Mucopolysaccharidosis III D |
| chr12 | 65122677 | 65122917 | 0.438 | Sanfilippo syndrome type D |
| | | | | Mucopolysaccharidosis III D |
| chr12 | 65122717 | 65122887 | 0.435 | Sanfilippo syndrome type D |
| | | | | Mucopolysaccharidosis III D |
| chr12 | 65130690 | 65130950 | 0.446 | Sanfilippo syndrome type D |
| | | | | Mucopolysaccharidosis III D |
| chr12 | 103234177 | 103234426 | 0.470 | Phenylketonurea |
| chr12 | 103234235 | 103234340 | 0.505 | Phenylketonurea |
| chr12 | 103237341 | 103237591 | 0.512 | Phenylketonurea |
| chr12 | 103237398 | 103237647 | 0.478 | Phenylketonurea |
| chr12 | 103237926 | 103238175 | 0.406 | Phenylketonurea |
| chr12 | 103240539 | 103240788 | 0.478 | Phenylketonurea |
| chr12 | 103245348 | 103245598 | 0.500 | Phenylketonurea |
| chr12 | 103245355 | 103245604 | 0.498 | Phenylketonurea |
| chr12 | 103245396 | 103245646 | 0.456 | Phenylketonurea |
| chr12 | 103246427 | 103246677 | 0.496 | Phenylketonurea |
| chr12 | 103246447 | 103246697 | 0.512 | Phenylketonurea |
| chr12 | 103246468 | 103246718 | 0.548 | Phenylketonurea |
| chr12 | 103246529 | 103246778 | 0.538 | Phenylketonurea |
| chr12 | 103248878 | 103249127 | 0.454 | Phenylketonurea |
| chr12 | 103248915 | 103249165 | 0.464 | Phenylketonurea |
| chr12 | 103260323 | 103260520 | 0.467 | Phenylketonurea |
| chr12 | 103260324 | 103260520 | 0.464 | Phenylketonurea |
| chr12 | 103260384 | 103260490 | 0.453 | Phenylketonurea |
| chr12 | 103288527 | 103288776 | 0.442 | Phenylketonurea |
| chr12 | 103306591 | 103306840 | 0.345 | Phenylketonurea |
| chr13 | 41373103 | 41373363 | 0.542 | Ornithine translocase deficiency HHH |
| | | | | Syndrome |
| chr13 | 41381416 | 41381666 | 0.460 | Ornithine translocase deficiency HHH |
| | | | | Syndrome |
| chr15 | 40707508 | 40707758 | 0.556 | Isovaleric acidemia |
| chr15 | 40707528 | 40707778 | 0.552 | Isovaleric acidemia |
| chr15 | 40707529 | 40707779 | 0.552 | Isovaleric acidemia |
| chr15 | 72638766 | 72639016 | 0.532 | Tay Sachs disease |
| chr15 | 72638773 | 72639023 | 0.548 | Tay Sachs disease |
| chr15 | 72638813 | 72639063 | 0.520 | Tay Sachs disease |
| chr15 | 72638834 | 72639084 | 0.500 | Tay Sachs disease |
| chr15 | 72638860 | 72639056 | 0.515 | Tay Sachs disease |
| chr15 | 72638888 | 72639158 | 0.500 | Tay Sachs disease |
| chr15 | 72640258 | 72640508 | 0.544 | Tay Sachs disease |
| chr15 | 72642729 | 72642989 | 0.523 | Tay Sachs disease |
| chr15 | 72642789 | 72643049 | 0.535 | Tay Sachs disease |
| chr15 | 72642795 | 72643055 | 0.527 | Tay Sachs disease |
| chr15 | 72642830 | 72643090 | 0.515 | Tay Sachs disease |
| chr15 | 89753880 | 89754130 | 0.580 | Retinal Dystrophy RLBP1 related Bothnia |
| | | | | retinal dystrophy |
| chr15 | 89753895 | 89754145 | 0.564 | Retinal Dystrophy RLBP1 related Bothnia |
| | | | | retinal dystrophy |
| chr15 | 89753901 | 89754151 | 0.564 | Retinal Dystrophy RLBP1 related Bothnia |
| | | | | retinal dystrophy |
| chr15 | 89753920 | 89754130 | 0.567 | Retinal Dystrophy RLBP1 related Bothnia |
| | | | | retinal dystrophy |
| chr16 | 3293218 | 3293428 | 0.524 | Familial mediterranean fever |
| chr16 | 3293282 | 3293532 | 0.532 | Familial mediterranean fever |
| chr16 | 3293284 | 3293534 | 0.536 | Familial mediterranean fever |
| chr16 | 3293312 | 3293561 | 0.558 | Familial mediterranean fever |
| chr16 | 3293322 | 3293572 | 0.548 | Familial mediterranean fever |
| chr16 | 3293404 | 3293654 | 0.516 | Familial mediterranean fever |
| chr16 | 3297026 | 3297276 | 0.584 | Familial mediterranean fever |
| chr16 | 3297032 | 3297302 | 0.589 | Familial mediterranean fever |
| chr16 | 3297056 | 3297276 | 0.582 | Familial mediterranean fever |
| chr16 | 3297061 | 3297271 | 0.576 | Familial mediterranean fever |
| chr16 | 3297076 | 3297256 | 0.572 | Familial mediterranean fever |
| chr16 | 3297081 | 3297251 | 0.571 | Familial mediterranean fever |
| chr17 | 435963 | 436203 | 0.433 | Pontocerebellar hypoplasia Type 2E |
| chr17 | 435973 | 436193 | 0.427 | Pontocerebellar hypoplasia Type 2E |
| chr17 | 465619 | 465869 | 0.476 | Pontocerebellar hypoplasia Type 2E |
| chr17 | 3386686 | 3386896 | 0.386 | canavan disease |
| chr17 | 3397597 | 3397807 | 0.343 | canavan disease |
| chr17 | 3402201 | 3402371 | 0.459 | canavan disease |
| chr17 | 19566518 | 19566768 | 0.352 | Sjogren Larsson syndrome |
| chr17 | 19574999 | 19575249 | 0.404 | Sjogren Larsson syndrome |
| chr6 | 51747804 | 51748053 | 0.382 | Autosomal recessive polycystic kidney |
| | | | | disease |
| chr12 | 103271260 | 103271440 | 0.528 | Phenylketonurea |
| chr12 | 103271262 | 103271432 | 0.506 | Phenylketonurea |
| chr12 | 103271265 | 103271435 | 0.512 | Phenylketonurea |
| chr12 | 103271270 | 103271440 | 0.524 | Phenylketonurea |
| chr12 | 103271293 | 103271492 | 0.492 | Phenylketonurea |
| chr2 | 219527213 | 219527463 | 0.588 | GRACILE syndrome |
| chr2 | 219527776 | 219528026 | 0.572 | GRACILE syndrome |
| chr2 | 234668852 | 234669102 | 0.564 | GRACILE syndrome |
| chr16 | 3304532 | 3304735 | 0.714 | Familial mediterranean fever |
| chr16 | 3304566 | 3304735 | 0.704 | Familial mediterranean fever |
| chr16 | 3304577 | 3304735 | 0.703 | Familial mediterranean fever |
| chr16 | 3304534 | 3304699 | 0.745 | Familial mediterranean fever |
| chr16 | 3304534 | 3304718 | 0.728 | Familial mediterranean fever |
| chr16 | 3304601 | 3304844 | 0.630 | Familial mediterranean fever |

### DETAILED DESCRIPTION

[0064] The invention pertains to a method for analyzing genetic abnormalities that involves hybridization-based enrichment of selected target regions across the human genome in a multiplexed panel assay, followed by quantification, coupled with a novel bioinformatics and mathematical analysis pipeline. An overview of the method is shown schematically in FIG. 1.

[0065] In-solution hybridization enrichment has been used in the past to enrich specific regions of interest prior to sequencing (see e.g., Meyer, M and Kirchner, M. (2010) Cold Spring Harb. Protoc. 2010(6):pdbprot5448; Liao, G. J. et al. (2012) PLOS One 7:e38154; Maricic, T. et al. (2010) PLOS One 5:e14004; Tewhey, R. et al. (2009) Genome Biol. 10:R116; Tsangaras, K. et al. (2014) PLOS One 9:e109101; PCT Publication WO 2016/189388; US Patent Publication 2016/0340733; Koumbaris, G. et al. (2016) Clinical chemistry, 62(6), pp. 848-855). However, for the methods of the invention, the target sequences (referred to as TArget Capture Sequences, or TACS) used to enrich for specific regions of interest have been optimized for maximum efficiency, specificity and accuracy and, furthermore, allow for assessment of fetal risk of inherited genetic conditions, as well as assessment of fetal risk of genetic abnormalities.

[0066] Furthermore, in certain embodiments, the TACS used in the methods are families of TACS, comprising a plurality of members that bind to the same genomic sequence but with differing start and/or stop positions, such that enrichment of the genomic sequences of interest is significantly improved compared to use of a single TACS binding to the genomic sequence. The configuration of such families of TACS is illustrated schematically in FIG. 3, showing that the different start and/or stop positions of the members of the TACS family when bound to the genomic sequence of interest results in a staggered binding pattern for the family members.

[0067] The use of families of TACS with the TACS pool that bind to each target sequence of interest, as compared to use of a single TACS within the TACS pool that binds to each target sequence of interest, significantly increases enrichment for the target sequences of interest, as evidenced by a greater than 50% average increase in read-depth for the family of TACS versus a single TACS. Comparison of use of a family of TACS versus a single TACS, and the significantly improved read-depth that was observed, is described in detail in Example 5.

### Parental Carrier Status and Fetal Risk of Inheritance of Genetic Conditions

[0068] The methods of the disclosure can be used to determine parental carrier status of inheritable genetic abnormalities associated with genetic conditions (e.g., maternal carrier status and, if necessary based on the maternal status, also paternal carrier status), and from this information the fetal risk of inheriting the genetic condition can be determined. An exemplification of this method is described in Example 6. Accordingly, in another aspect, the invention pertains to a method of determining fetal risk of inheriting a genetic condition, the method comprising:
[0069] (a) preparing a sequencing library from a sample comprising maternal and fetal DNA;
[0070] (b) hybridizing the sequencing library to a pool of double-stranded TArget Capture Sequences (TACS), wherein the pool of TACS comprises a plurality of sequences that bind to genomic sequences of interest including variant allele loci of interest associated with different genetic conditions;
[0071] (c) isolating members of the sequencing library that bind to the pool of TACS to obtain an enriched library;
[0072] (d) amplifying and sequencing the enriched library;
[0073] (e) performing statistical analysis on the enriched library sequences to thereby determine maternal carrier status at the loci of interest associated with different genetic conditions, wherein for a sample with a positive maternal carrier status, the method further comprises:
[0074] (f) obtaining a paternal DNA sample and performing steps (a)-(e) on the paternal DNA sample to determine paternal carrier status at those loci for which there is a positive maternal carrier status; and
[0075] (g) determining fetal risk of inheriting a genetic condition based on maternal carrier status and, when (f) is performed, paternal carrier status.

[0076] In one embodiment,
[0077] (i) each member sequence within the pool of TACS is between 100-500 base pairs in length, each member sequence having a 5′ end and a 3′ end;
[0078] (ii) each member sequence binds to the same locus of interest at least 50 base pairs away, on both the 5′ end and the 3′ end, from regions harboring Copy Number Variations (CNVs), Segmental duplications or repetitive DNA elements; and
[0079] (iii) the GC content of the pool of TACS is between 19% and 80%, as determined by calculating the GC content of each member within the pool of TACS.

[0080] The method of carrier determination and fetal inheritance risk can be combined with detecting chromosomal and structural abnormalities in the fetal DNA, as described in Examples 1-4, in the same sample containing the maternal and fetal DNA (e.g., the maternal plasma sample). That is, maternal carrier determination and detection of fetal chromosomal abnormalities can be assessed simultaneously using the same sample (e.g., maternal plasma sample) through the inclusion of the appropriate TACS in the pool of TACS used in the method. Accordingly, in one embodiment of the method, the pool of TACS further comprises sequences that bind to chromosomes of interest for detecting fetal chromosomal abnormalities and step (e) further comprises performing statistical analysis on the enriched library sequences to thereby determine fetal risk of a chromosomal abnormality at the chromosome of interest. In one embodiment, the chromosomal abnormality is an aneuploidy, such as a trisomy or a monosomy. Other types of chromosomal abnormalities that can be detected are described herein. In one embodiment, the chromosomes of interest include chromosomes 13, 18, 21, X and Y.

[0081] For determining parental carrier status, TACS are designed to bind to variant allele loci of interest that are associated with inheritable genetic conditions. In one embodiment, the sample (e.g., maternal plasma sample) is screened to determine maternal carrier status for a plurality of variant alleles, wherein each family of TACS binds to a variant allele locus associated with a genetic condition. In one embodiment the variant allele loci of interest are associated with genetic conditions selected from the group consisting of, but not limited to, Achondroplasia, Alpha-1 Antitrypsin Deficiency, Antiphospholipid Syndrome, Autism, Autosomal Dominant Polycystic Kidney Disease, Autosomal Recessive Polycystic Kidney Disease, Inheritable Breast Cancer Gene, Charcot-Marie-Tooth, Inheritable Colon Cancer Gene, Crohn's Disease, Cystic Fibrosis, Dercum Disease, Duane Syndrome, Duchenne Muscular Dystrophy, Factor V Leiden Thrombophilia, Familial Hypercholesterolemia, Familial Mediterranean Fever, Fragile X Syndrome, Gaucher Disease, Hemochromatosis, Hemophilia, Holoprosencephaly, Huntington's Disease, Marfan Syndrome, Myotonic Dystrophy, Neurofibromatosis, Noonan Syndrome, Osteogenesis Imperfecta, Phenylketonuria, Poland Anomaly, Porphyria, Prostate Cancer, Retinitis Pigmentosa, Severe Combined Immunodeficiency (SCID), Sickle Cell Disease, Spinal Muscular Atrophy, Tay-Sachs, Thalassemia, WAGR Syndrome, Wilson Disease, and combinations thereof.

[0082] For samples in which the mother has been determined to be a carrier of a variant allele associated with an inheritable genetic condition (positive maternal carrier status), a sample of paternal DNA can also be assessed using the method to thereby determine the parental carrier status, thus allowing for calculation of the fetal risk of inheritance of the genetic condition. Accordingly, in one embodiment, the method further comprises, for a sample with a positive maternal carrier status, obtaining a paternal DNA sample and performing steps (a)-(e) of the above-described method on the paternal DNA sample to determine paternal carrier status, to thereby compute a fetal risk score for inheriting the genetic condition.

[0083] A non-limiting example of computation of a fetal risk score is described in Example 6, in which both the maternal sample and the paternal sample are carriers for a recessive disease-associated allele (heterozygous for the recessive disease-associated allele) and thus the fetus is calculated to have a 25% chance of inheriting a homozygous recessive disease-associated genotype. Alternative fetal risk scores based on the maternal and/or paternal carrier status and the recessiveness or dominance of the disease-associated allele can readily be calculated by the ordinarily skilled artisan using Mendelian Genetics reasoning well established in the art.

[0084] In one embodiment, the pool of TACS comprises a plurality of TACS families, wherein each member of a TACS family binds to the same target sequence of interest but with different start and/or stop positions on the sequence with respect to a reference coordinate system (i.e., binding of TACS family members to the target sequence is staggered) to thereby enrich for target sequences of interest, followed by massive parallel sequencing and statistical analysis of the enriched population. The use of families of TACS with the TACS pool that bind to each target sequence of interest, as compared to use of a single TACS within the TACS pool that binds to each target sequence of interest, significantly increases enrichment for the target sequences of interest, as evidenced by a greater than 50% average increase in read-depth for the family of TACS versus a single TACS.

[0085] Accordingly, in one embodiment, the pool of TACS comprises a plurality of TACS families directed to different genomic sequences of interest, wherein each TACS family comprises a plurality of member sequences, wherein each member sequence binds to the same genomic sequence of interest but has different start and/or stop positions with respect to a reference coordinate system for the genomic sequence of interest.

[0086] Thus, in another aspect, the invention pertains to a method of determining fetal risk of inheriting a genetic condition, the method comprising:
[0087] (a) preparing a sequencing library from a sample comprising maternal and fetal DNA;
[0088] (b) hybridizing the sequencing library to a pool of double-stranded TArget Capture Sequences (TACS), wherein the pool of TACS comprises a plurality of TACS families directed to variant allele loci of interest associated with different genetic conditions, wherein each TACS family comprises a plurality of member sequences, wherein each member sequence binds to the same variant allele loci of interest but has different start and/or stop positions with respect to a reference coordinate system for the variant allele loci of interest;
[0089] (c) isolating members of the sequencing library that bind to the pool of TACS to obtain an enriched library;
[0090] (d) amplifying and sequencing the enriched library; and
[0091] (e) performing statistical analysis on the enriched library sequences to thereby determine maternal carrier status at the loci of interest associated with different genetic conditions, wherein for a sample with a positive maternal carrier status, the method further comprises:
[0092] (f) obtaining a paternal DNA sample and performing steps (a)-(e) on the paternal DNA sample to determine paternal carrier status for those diseases in which there is a positive maternal carrier status; and
[0093] (g) determining fetal risk of inheriting a genetic condition based on maternal carrier status and, when (f) is performed, paternal carrier status.

[0094] In one embodiment:
[0095] (i) each member sequence within each TACS family is between 100-500 base pairs in length, each member sequence having a 5′ end and a 3′ end;
[0096] (ii) each member sequence binds to the same variant allele locus of interest at least 50 base pairs away, on both the 5′ end and the 3′ end, from regions harboring Copy Number Variations (CNVs), Segmental duplications or repetitive DNA elements; and
[0097] (iii) the GC content of the pool of TACS is between 19% and 80%, as determined by calculating the GC content of each member within each family of TACS.

[0098] The TACS-enrichment based method of the disclosure can be used in the detection of a wide variety of genetic abnormalities. In one embodiment, the genetic abnormality is a chromosomal aneuploidy (such as a trisomy, a partial trisomy or a monosomy). In other embodiments, the genomic abnormality is a structural abnormality, including but not limited to copy number changes including microdeletions and microduplications, insertions, translocations, inversions and small-size mutations including point mutations and mutational signatures. In another embodiment, the genetic abnormality is a chromosomal mosaicism.

### TArget Capture Sequence Design

[0099] As used herein, the term “TArget Capture Sequences” or “TACS” refers to short DNA sequences that are complementary to the region(s) of interest on a genomic sequence(s) of interest (e.g., chromosome(s) of interest) and which are used as “bait” to capture and enrich the region of interest from a large library of sequences, such as a whole genomic sequencing library prepared from a biological sample. A pool of TACS is used for enrichment wherein the sequences within the pool have been optimized with regard to: (i) the length of the sequences; (ii) the distribution of the TACS across the region(s) of interest; and (iii) the GC content of the TACS. The number of sequences within the TACS pool (pool size) has also been optimized.

[0100] It has been discovered that TACS having a length of 100-500 base pairs are optimal to maximize enrichment efficiency. In various other embodiments, each sequence within the pool of TACS is between 150-260 base pairs, 100-200 base pairs, 200-260 base pairs, 100-350 base pairs in length, or 100-500 base pairs in length. In preferred embodiments, the length of the TACS within the pool is at least 250 base pairs, or is 250 base pairs or is 260 base pairs or is 280 base pairs. It will be appreciated by the ordinarily skilled artisan that a slight variation in TACS size typically can be used without altering the results (e.g., the addition or deletion of a few base pairs on either end of the TACS); accordingly, the base pair lengths given herein are to be considered “about” or “approximate”, allowing for some slight variation (e.g., 1-5%) in length. Thus, for example, a length of “250 base pairs” is intended to refer to “about 250 base pairs” or “approximately 250 base pairs”, such that, for example, 248 or 252 base pairs is also encompassed.

[0101] The distribution of the TACS across each region or chromosome of interest has been optimized to avoid high copy repeats, low copy repeats and copy number variants, while at the same time also being able to target informative single nucleotide polymorphisms (SNPs) in order to enable both aneuploidy, or structural copy number change detection, and fetal fraction (ff) estimation. Accordingly, each sequence within the TACS pool is designed such that the 5′ end and the 3′ end are each at least 50 base pairs away from regions in the genome that are known to harbour one or more of the following genomic elements: Copy Number Variations (CNVs), Segmental duplications and/or repetitive DNA elements (such as transposable elements or tandem repeat areas). In various other embodiments, each sequence within the TACS pool is designed such that the 5′ end and the 3′ end are each at least 50, 100, 150, 200, 250, 300, 400 or 500 base pairs away from regions in the genome that are known to harbour one or more of the aforementioned elements.

[0102] The term “Copy Number Variations” is a term of art that refers to a form of structural variation in the human genome in which there can be alterations in the DNA of the genome in different individuals that can result in a fewer or greater than normal number of a section(s) of the genome in certain individuals. CNVs correspond to relatively large regions of the genome that may be deleted (e.g., a section that normally is A-B-C-D can be A-B-D) or may be duplicated (e.g., a section that normally is A-B-C-D can be A-B-C-C-D). CNVs account for roughly 13% of the human genome, with each variation ranging in size from about 1 kilobase to several megabases in size.

[0103] The term “Segmental duplications” (also known as “low-copy repeats”) is also a term of art that refers to blocks of DNA that range from about 1 to 400 kilobases in length that occur at more than one site within the genome and typically share a high level (greater than 90%) of sequence identity. Segmental duplications are reviewed in, for example, Eichler. E. E. (2001) Trends Genet. 17:661-669.

[0104] The term “repetitive DNA elements” (also known as “repeat DNA” or “repeated DNA”) is also a term of art that refers to patterns of DNA that occur in multiple copies throughout the genome. The term “repetitive DNA element” encompasses terminal repeats, tandem repeats and interspersed repeats, including transposable elements. Repetitive DNA elements in NGS is discussed further in, for example, Todd, J. et al. (2012) Nature Reviews Genet. 13:36-46.

[0105] The TACS are designed with specific GC content characteristics in order to minimize data GC bias and to allow a custom and innovative data analysis pipeline. It has been determined that TACS with a GC content of 19-80% achieve optimal enrichment and perform best with cell free fetal DNA. Within the pool of TACS, different sequences can have different % GC content, although to be selected for inclusion with the pool, the % GC content of each sequence is chosen as between 19-80%, as determined by calculating the GC content of each member within the pool of TACS or within each family of TACS. That is, every member within the pool or within each family of TACS in the pool has a % GC content within the given percentage range (e.g., between 19-80% GC content).

[0106] In some instances, the pool of TACS (e.g., each member within each family of TACS) may be chosen so as to define a different % GC content range, deemed to be more suitable for the assessment of specific genetic abnormalities. Non-limiting examples of various % GC content ranges, can be between 19% and 80%, or between 19% and 79%, or between 19% and 78%, or between 19% and 77%, or between 19% and 76%, or between 19% and 75%, or between 19% and 74%, or between 19% and 73%, or between 19% and 72%, or between 19% and 71%, or between 19% and 70%, or between 19% and 69%, or between 19% and 68%, or between 19% and 67%, or between 19% and 66%, or between 19% and 65%, or between 19% and 64%, or between 19% and 63%, or between 19% and 62%, or between 19% and 61%, or between 19% and 60%, or between 19% and 59%, or between 19% and 58%, or between 19% and 57%, or between 19% and 56%, or between 19% and 55%, or between 19% and 54%, or between 19% and 53%, or between 19% and 52%, or between 19% and 51%, or between 19% and 50%, or between 19% and 49%, or between 19% and 48%, or between 19% and 47%, or between 19% and 46%, or between 19% and 45%, or between 19% and 44%, or between 19% and 43%, or between 19% and 42%, or between 19% and 41%, or between 19% and 40%.

[0107] As described in further detail below with respect to one embodiment of the data analysis, following amplification and sequencing of the enriched sequences, the test loci and reference loci can then be “matched” or grouped together according to their % GC content (e.g., test loci with a % GC content of 40% is matched with reference loci with a % GC content of 40%). It is appreciated that the % GC content matching procedure may allow slight variation in the allowed matched % GC range. A non-limiting instance, and with reference to the previously described example in text, a test locus with % GC content of 40% could be matched with reference loci of % GC ranging from 39-41%, thereby encompassing the test locus % GC within a suitable range.

[0108] To prepare a pool of TACS having the optimized criteria set forth above with respect to size, placement within the human genome and % GC content, both manual and computerized analysis methods known in the art can be applied to the analysis of the human reference genome. In one embodiment, a semi-automatic method is implemented where regions are firstly manually designed based on the human reference genome build 19 (hg19) ensuring that the aforementioned repetitive regions are avoided and subsequently are curated for GC-content using software that computes the % GC-content of each region based on its coordinates on the human reference genome build 19 (hg19). In another embodiment, custom-built software is used to analyze the human reference genome in order to identify suitable TACS regions that fulfil certain criteria, such as but not limited to, % GC content, proximity to repetitive regions and/or proximity to other TACS.

[0109] The number of TACS in the pool has been carefully examined and adjusted to achieve the best balance between result robustness and assay cost/throughput. The pool typically contains at least 800 or more TACS, but can include more, such as 1500 or more TACS, 2000 or more TACS or 2500 or more TACS or 3500 or more TACS or 5000 or more TACS. It has been found that an optimal number of TACS in the pool is 5000. It will be appreciated by the ordinarily skilled artisan that a slight variation in pool size typically can be used without altering the results (e.g., the addition or removal of a small number of TACS); accordingly, the number sizes of the pool given herein are to be considered “about” or “approximate”, allowing for some slight variation (e.g., 1-5%) in size. Thus, for example, a pool size of “1600 sequences” is intended to refer to “about 1600 sequences” or “approximately 1600 sequences”, such that, for example, 1590 or 1610 sequences is also encompassed.

[0110] In view of the foregoing, in another aspect, the invention provides a method for preparing a pool of TACS for use in the method of the invention for detecting risk of a chromosomal and/or other genetic abnormality, wherein the method for preparing the pool of TACS comprises: selecting regions in one or more chromosomes of interest having the criteria set forth above (e.g., at least 50 base pairs away on either end from the aforementioned repetitive sequences and a GC content of between 19% and 80%, as determined by calculating the GC content of each member within each family of TACS), preparing primers that amplify sequences that hybridize to the selected regions, and amplifying the sequences, wherein each sequence is 100-500 base pairs in length.

[0111] For use in the methods of the disclosure, the pool of TACS typically is fixed to a solid support, such as beads (such as magnetic beads) or a column. In one embodiment, the pool of TACS are labeled with biotin and are bound to magnetic beads coated with a biotin-binding substance, such as streptavidin or avidin, to thereby fix the pool of TACS to a solid support. Other suitable binding systems for fixing the pool of TACS to a solid support (such as beads or column) are known to the skilled artisan and readily available in the art. When magnetic beads are used as the solid support, sequences that bind to the TACS affixed to the beads can be separated magnetically from those sequences that do not bind to the TACS.

### Families of TACS

[0112] In one embodiment, the pool of TACS comprises a plurality of TACS families directed to different genomic sequences of interest, wherein each TACS family comprises a plurality of member sequences, wherein each member sequence binds to the same genomic sequence of interest but has different start and/or stop positions with respect to a reference coordinate system for the genomic sequence of interest.

[0113] Each TACS family comprises a plurality of members that bind to the same genomic sequence of interest but having different start and/or stop positions with respect to a reference coordinate system for the genomic sequence of interest. Typically, the reference coordinate system that is used for analyzing human genomic DNA is the human reference genome built hg19, which is publically available in the art, but other reference coordinate systems can be used as well. Alternatively, the reference coordinate system can be an artificially created genome based on built hg19 that contains only the genomic sequences of interest. Exemplary non-limiting examples of start/stop positions for TACS that bind to chromosome 13, 18, 21, X or Y are shown in FIG. 2.

[0114] Each TACS family comprises at least 2 members that bind to the same genomic sequence of interest. In various embodiments, each TACS family comprises at least 2 member sequences, or at least 3 member sequences, or at least 4 member sequences, or at least 5 member sequences, or at least 6 member sequences, or at least 7 member sequences, or at least 8 member sequence, or at least 9 member sequences, or at least 10 member sequences. In various embodiments, each TACS family comprises 2 member sequences, or 3 member sequences, or 4 member sequences, or 5 member sequences, or 6 member sequences, or 7 member sequences, or 8 member sequences, or 9 member sequences, or 10 member sequences. In various embodiments, the plurality of TACS families comprises different families having different numbers of member sequences. For example, a pool of TACS can comprise one TACS family that comprises 3 member sequences, another TACS family that comprises 4 member sequences, and yet another TACS family that comprises 5 member sequences, and the like. In one embodiment, a TACS family comprises 3-5 member sequences. In another embodiment, the TACS family comprises 4 member sequences.

[0115] The pool of TACS comprises a plurality of TACS families. Thus, a pool of TACS comprises at least 2 TACS families. In various embodiments, a pool of TACS comprises at least 3 different TACS families, or at least 5 different TACS families, or at least 10 different TACS families, or at least 50 different TACS families, or at least 100 different TACS families, or at least 500 different TACS families, or at least 1000 different TACS families, or at least 2000 TACS families, or at least 4000 TACS families, or at least 5000 TACS families.

[0116] Each member within a family of TACS binds to the same genomic region of interest but with different start and/or stop positions, with respect to a reference coordinate system for the genomic sequence of interest, such that the binding pattern of the members of the TACS family is staggered (see FIG. 3). In various embodiments, the start and/or stop positions are staggered by at least 3 base pairs, or at least 4 base pairs, or at least 5 base pairs, or at least 6 base pairs, or at least 7 base pairs, or at least 8 base pairs, or at least 9 base pairs, or at least 10 base pairs, or at least 15 base pairs, or at least 20 base pairs, or at least 25 base pairs. Typically, the start and/or stop positions are staggered by 5-10 base pairs. In one embodiment, the start and/or stop positions are staggered by 5 base pairs. In another embodiment, the start and/or stop positions are staggered by 10 base pairs.

### Sample Collection and Preparation

[0117] The methods of the invention can be used with a variety of biological samples. In one embodiment for NIPT, the sample is a mixed sample that contains both maternal DNA and fetal DNA (e.g., cell-free fetal DNA (cffDNA)), such as a maternal plasma sample obtained from maternal peripheral blood. Typically for mixed maternal/fetal DNA samples, the sample is a maternal plasma sample, although other tissue sources that contain both maternal and fetal DNA can be used. Maternal plasma can be obtained from a peripheral whole blood sample from a pregnant woman and the plasma can be obtained by standard methods. As little as 2-4 ml of plasma is sufficient to provide suitable DNA material for analysis according to the method of the disclosure. Total cell free DNA can then be extracted from the sample using standard techniques, non-limiting examples of which include a Qiasymphony protocol (Qiagen) suitable for free fetal DNA isolation or any other manual or automated extraction method suitable for cell free DNA isolation.

[0118] For the biological sample preparation, typically cells are lysed and DNA is extracted using standard techniques known in the art, a non-limiting example of which is the Qiasymphony (Qiagen) protocol.

[0119] Following isolation, the cell free DNA of the sample is used for sequencing library construction to make the sample compatible with a downstream sequencing technology, such as Next Generation Sequencing. Typically this involves ligation of adapters onto the ends of the cell free DNA fragments, followed by amplification. Sequencing library preparation kits are commercially available. A non-limiting exemplary protocol for sequencing library preparation is described in detail in Example 1.

### Enrichment by TACS Hybridization

[0120] The region(s) of interest on the chromosome(s) of interest is enriched by hybridizing the pool of TACS to the sequencing library, followed by isolation of those sequences within the sequencing library that bind to the TACS. To facilitate isolation of the desired, enriched sequences, typically the TACS sequences are modified in such a way that sequences that hybridize to the TACS can be separated from sequences that do not hybridize to the TACS. Typically, this is achieved by fixing the TACS to a solid support. This allows for physical separation of those sequences that bind the TACS from those sequences that do not bind the TACS. For example, each sequence within the pool of TACS can be labeled with biotin and the pool can then be bound to beads coated with a biotin-binding substance, such as streptavidin or avidin. In a preferred embodiment, the TACS are labeled with biotin and bound to streptavidin-coated magnetic beads. The ordinarily skilled artisan will appreciate, however, that other affinity binding systems are known in the art and can be used instead of biotin-streptavidin/avidin. For example, an antibody-based system can be used in which the TACS are labeled with an antigen and then bound to antibody-coated beads. Moreover, the TACS can incorporate on one end a sequence tag and can be bound to a solid support via a complementary sequence on the solid support that hybridizes to the sequence tag. Furthermore in addition to magnetic beads, other types of solid supports can be used, such as polymer beads and the like.

[0121] In certain embodiments, the members of the sequencing library that bind to the pool of TACS are fully complementary to the TACS. In other embodiments, the members of the sequencing library that bind to the pool of TACS are partially complementary to the TACS. For example, in certain circumstances it may be desirable to utilize and analyze data that are from DNA fragments that are products of the enrichment process but that do not necessarily belong to the genomic regions of interest (i.e. such DNA fragments could bind to the TACS because of part homologies (partial complementarity) with the TACS and when sequenced would produce very low coverage throughout the genome in non-TACS coordinates).

[0122] Following enrichment of the sequence(s) of interest using the TACS, thereby forming an enriched library, the members of the enriched library are eluted from the solid support and are amplified and sequenced using standard methods known in the art. Next Generation Sequencing is typically used, although other sequencing technologies can also be employed, which provides very accurate counting in addition to sequence information. To detect genetic abnormalities, such as but not limited to, aneuploidies or structural copy number changes requires very accurate counting and NGS is a type of technology that enables very accurate counting. Accordingly, for the detection of genetic abnormalities, such as but not limited to, aneuploidies or structural copy number changes, other accurate counting methods, such as digital PCR and microarrays can also be used instead of NGS. Non-limiting exemplary protocols for amplification and sequencing of the enriched library are described in detail in Example 3.

### Data Analysis

[0123] The information obtained from the sequencing of the enriched library can be analyzed using an innovative biomathematical/biostatistical data analysis pipeline. Details of an exemplary analysis using this pipeline are described in depth in Example 4, and in further detail below. Alternative data analysis approaches for different purposes are also provided herein.

[0124] The analysis pipeline described in Example 4 exploits the characteristics of the TACS, and the high-efficiency of the target capture enables efficient detection of aneuploidies or structural copy number changes, as well as other types of genetic abnormalities. In the analysis, first the sample's sequenced DNA fragments are aligned to the human reference genome. QC metrics are used to inspect the aligned sample's properties and decide whether the sample is suitable to undergo classification. These QC metrics can include, but are not limited to, analysis of the enrichment patterns of the loci of interest, such as for example the overall sequencing depth of the sample, the on-target sequencing output of the sample, TACS performance, GC bias expectation, fraction of interest quantification. For determining the risk of a chromosomal abnormality in the fetal DNA of the sample, an innovative algorithm is applied. The steps of the algorithm include, but are not limited to, removal of inadequately sequenced loci, read-depth and fragment-size information extraction at TACS-specific coordinates, genetic (GC-content) bias alleviation and ploidy status classification.

[0125] Ploidy status determination is achieved using one or more statistical methods, non-limiting examples of which include a t-test method, a bootstrap method, a permutation test and/or a binomial test of proportions and/or segmentation-based methods and/or combinations thereof. It will be appreciated by the ordinarily skilled artisan that the selection and application of tests to be included in ploidy status determination is based on the number of data points available. As such, the suitability of each test is determined by various factors such as, but not limited to, the number of TACS utilized and the respective application for GC bias alleviation, if applicable. Thus, the aforementioned methods are to be taken as examples of the types of statistical analysis that may be employed and are not the only methods suitable for the determination of ploidy status. Typically, the statistical method results in a score value for the mixed sample and risk of the chromosomal abnormality in the fetal DNA is detected when the score value for the mixed sample is above a reference threshold value.

[0126] In particular, one aspect of the statistical analysis involves quantifying and alleviating GC-content bias. In addition to the challenge of detecting small signal changes in fetal DNA in the mixed sample, and/or other components of DNA of interest part of a mixed sample (for example, but not limited to, additional or less genetic material from certain chromosomal regions), the sequencing process itself introduces certain biases that can obscure signal detection. One such bias is the preferential sequencing/amplification of genetic regions based on their GC-content. As such, certain detection methods, such as but not limited to, read-depth based methods, need to account for such bias when examining sequencing data. Thus, the bias in the data needs to be quantified and, subsequently, suitable methods are applied to account for it such that genetic context dependencies cannot affect any statistical methods that may be used to quantify fetal genetic abnormality risk.

[0127] For example, one method of quantifying the GC-content bias is to use a locally weighted scatterplot smoothing (LOESS) technique on the sequencing data. Each targeted locus may be defined by its sequencing read-depth output and its' GC-content. A line of best fit through these two variables, for a large set of loci, provides an estimate of the expected sequencing read-depth given the GC-content. Once this GC-bias quantification step is completed, the next step is to use this information to account for possible biases in the data. One method is to normalize the read-depth of all loci by their expected read-depth (based on each locus' GC-content). In principle, this unlinks the read-depth data from their genetic context and makes all data comparable. As such, data that are retrieved from different GC-content regions, such as for example, but not limited, to different chromosomes, can now be used in subsequent statistical tests for detection of any abnormalities. Thus, using the LOESS procedure, the GC bias is unlinked from the data prior to statistical testing. In one embodiment, the statistical analysis of the enriched library sequences comprises alleviating GC bias using a LOESS procedure.

[0128] In an alternative preferred embodiment, the GC-content bias is quantified and alleviated by grouping together loci of similar (matching) GC-content. Thus, conceptually this method for alleviating GC-content bias comprises of three steps, as follows:
[0129] 1) identification and calculation of GC-content in the TACS;
[0130] 2) alleviation/accounting of GC-content bias using various matching/grouping procedures of the TACS; and
[0131] 3) calculation of risk of any genetic abnormalities that may be present in the fetus utilizing statistical and mathematical methods on datasets produced from step 2.

[0132] For the t-test method, the dataset is split into two groups; the test loci and the reference loci. For each group, subsets of groups are created where loci are categorized according to their GC-content as illustrated in a non-limiting example in the sample Table 1 below:

TABLE 1

| GC | Reference loci read-depth | Test loci read-depth |
|---|---|---|
| 40% | x₁⁴⁰, x₂⁴⁰, . . . , xₙₓ₄₀⁴⁰ | y₁⁴⁰, y₂⁴⁰, . . . , y_{ny40}⁴⁰ |
| 41% | x₁⁴¹, x₂⁴¹, . . . , xₙₓ₄₁⁴¹ | y₁⁴¹, y₂⁴¹, . . . , y_{ny41}⁴¹ |
| 42% | x₁⁴², x₂⁴², . . . , xₙₓ₄₂⁴² | y₁⁴², y₂⁴², . . . , y_{ny42}⁴² |
| . . . | . . . | . . . |

It is appreciated by the ordinarily skilled artisan that subgroup creation may involve encompassing a range of appropriate GC-content and/or a subset of loci that are defined by a given GC-content and/or GC-content range. Accordingly, the % GC content given in the non-limiting example of Table 1 are to be considered “about” or “approximate”, allowing for some slight variation (e.g., 1-2%). Thus, for example, a % GC content of “40%” is intended to refer to “about 40%” or “approximately 40%”, such that, for example, “39%-41%” GC-content loci may also be encompassed if deemed appropriate.
Hence, when referring to a particular GC-content it is understood that the reference and test loci subgroups may comprise of any number of loci related to a particular % GC content and/or range.

[0133] Subsequently, for each GC-content subgroup, a representative read-depth is calculated. A number of methods may be utilized to choose this such as, but not limited to, the mean, median or mode of each set. Thus, two vectors of representative read-depth are created where one corresponds to the reference loci and the other to the test loci (e.g., Xm, Ym). In one embodiment, the two vectors may be tested against each other to identify significant differences in read-depth. In another embodiment, the difference of the two vectors may be used to assess if there are significant discrepancies between the test and reference loci. The sample is attributed the score of the test.

[0134] For statistical analysis using a bootstrap approach, the dataset is split into two groups, the test loci and the reference loci. The GC-content of each locus is then calculated. Then the following procedure is performed:

[0135] A random locus is selected from the reference loci; its read-depth and GC-content are recorded. Subsequently, a random locus from the test loci is selected, with the only condition being that its' GC-content is similar to that of the reference locus. Its read-depth is recorded. It is appreciated by the ordinarily skilled artisan that GC-content similarity may encompass a range of suitable GC-content. As such, referral to a specific % GC content may be considered as “approximate” or “proximal” or “within a suitable range” (e.g., 1%-2%) encompassing the specific % GC content under investigation. Thus, a reference-test locus pair of similar GC-content is created. The difference of the reference-test pair is recorded, say E1. The loci are then replaced to their respective groups. This process is repeated until a bootstrap sample of the same size as the number of test TACS present is created. A representative read-depth of the bootstrap sample is estimated, say E_mu, and recorded. A number of methods may be utilized to do so, such as but not limited to, the mean, mode or median value of the vector, and/or multiples thereof.

[0136] The process described above is repeated as many times as necessary and a distribution of E_mu is created. The sample is then attributed a score that corresponds to a percentile of this distribution.

[0137] For statistical analysis using a permutation test, the dataset is sorted firstly into two groups, the test-loci and the reference loci. For each group, subsets of groups are created, where loci are categorized according to their GC-content similarity (see columns 2 and 3 of the non-limiting sample Table 2 below). The number of loci present in each test subgroup is also recorded. The loci of the test group are utilized to calculate an estimate of the test-group's read-depth, say Yobs. A representative number from each GC-content subgroup may be selected to do so. Any number of methods may be used to provide a read-depth estimate, such as but not limited to, the mean, median or mode of the chosen loci.

TABLE 2

| | Reference | | test | |
|---|---|---|---|---|
| | loci read- | Test loci | loci | |
| GC | depth | read-depth | num | Merging of loci |
| 40% | x₁⁴⁰, x₂⁴⁰, . . . , xₙₓ₄₀⁴⁰ | y₁⁴⁰, y₂⁴⁰, . . . , y_{ny40}⁴⁰ | ny40 | x₁⁴⁰, . . . , xₙₓ₄₀⁴⁰, y₁⁴⁰, . . . , y_{ny40}⁴⁰ |
| 41% | x₁⁴¹, x₂⁴¹, . . . , xₙₓ₄₁⁴¹ | y₁⁴¹, y₂⁴¹, . . . , y_{ny41}⁴¹ | ny41 | x₁⁴¹, . . . , xₙₓ₄₁⁴¹, y₁⁴¹, . . . , y_{ny41}⁴¹ |
| 42% | x₁⁴², x₂⁴², . . . , xₙₓ₄₂⁴² | y₁⁴², y₂⁴², . . . , y_{ny42}⁴² | ny42 | x₁⁴², . . . , xₙₓ₄₂⁴², y₁⁴², . . . , y_{ny42}⁴² |
| . . . | . . . | . . . | . . . | . . . |

[0138] A distribution to test Yobs is then built utilizing loci irrespective of their test or reference status as follows. The test and reference loci of each GC-content subgroup (see last column of sample Table 2) are combined to allow for calculation of a new read-depth estimate. From each merged subgroup a number of loci are chosen at random, where this number is upper-bounded by the number of test-loci utilized in the original calculation of Yobs (e.g., for GC content 40%, and in the context of the non-limiting sample Table 2, this number of loci may be in the range [1,ny40]). The new read-depth estimate is calculated from all the chosen loci. The procedure is iterated as many times as necessary in order to build a distribution of observed means. A sample is then attributed a score that corresponds to the position of Yobs in this distribution using a suitable transformation that accounts for the moments of the built distribution. As with the already described methods, it is appreciated that slight variation in % GC content is allowed (e.g., 1%-2%), if deemed appropriate. Hence, reference to a specific GC-content could be taken as “about” or “approximate”, so that for example when referring to a 40% GC-content, loci that are “approximately” or “about” 40% (e.g., 39%-41%) may be utilized in the method.

[0139] For statistical analysis using a binomial test of proportions, fragment-sizes aligned to TACS-specific genomic coordinates are used. It has been shown that fragments of cell free genetic material originating from the placenta tend to be smaller in length when compared to other cell free genetic material (Chan, K. C. (2004) Clin. Chem. 50:88-92). Hence, the statistic of interest is whether the proportion of small-size fragments aligned to a TACS-specific test-region deviates significantly from what is expected when comparing it to the respective proportion of other TACS-specific reference-regions, as this would indicate fetal genetic abnormalities.

[0140] Thus, fragment-sizes are assigned into two groups. Sizes related to the test loci are assigned to one group and fragment-sizes related to the reference loci are assigned to the other group. Subsequently, in each group, fragment sizes are distributed into two subgroups, whereby small-size fragments are assigned into one subgroup and all remaining fragments are designated to the remaining subgroup. The last step computes the proportion of small-sized fragments in each group and uses these quantities in a binomial test of proportions. The score of the test is attributed to the sample under investigation.

[0141] The final result of a sample may be given by combining one or more scores derived from the different statistical methods, non-limiting examples of which are given in Example 4.

### Kits of the Invention

[0142] In another aspect, the invention provides kits for carrying out the methods of the disclosure. In one embodiment, the kit comprises a container consisting of the pool of TACS and instructions for performing the method. In one embodiment, the TACS are provided in a form that allows them to be bound to a solid support, such as biotinylated TACS. In another embodiment, the TACS are provided together with a solid support, such as biotinylated TACS provided together with streptavidin-coated magnetic beads.

[0143] In one embodiment, the kit comprises a container comprising the pool of TACS and instructions for performing the method, wherein the pool of TACS comprises a plurality of member sequences, wherein:
[0144] (i) each member sequence within the TACS pool is between 100-500 base pairs in length, each member sequence having a 5′ end and a 3′ end;
[0145] (ii) each member sequence binds to the same genomic sequence of interest at least 50 base pairs away, on both the 5′ end and the 3′ end, from regions harboring Copy Number Variations (CNVs), Segmental duplications or repetitive DNA elements; and
[0146] (iii) the GC content of the pool of TACS is between 19% and 80%, as determined by calculating the GC content of each member within the pool of TACS.

[0147] In one embodiment, the pool of TACS comprises a plurality of TACS families, wherein each TACS family comprises a plurality of member sequences, wherein each member sequence binds to the same genomic sequence of interest but has different start and/or stop positions with respect to a reference coordinate system for the genomic sequence of interest,

[0148] Furthermore, any of the various features described herein with respect to the design and structure of the TACS can be incorporated into the TACS that are included in the kit.

[0149] In various other embodiments, the kit can comprise additional components for carrying out other aspects of the method. For example, in addition to the pool of TACS, the kit can comprise one or more of the following (i) one or more components for isolating cell free DNA from a biological sample (e.g., as described in Example 1); (ii) one or more components for preparing the sequencing library (e.g., primers, adapters, buffers, linkers, restriction enzymes, ligation enzymes, polymerase enzymes and the like as described in detail in Example 1); (iii) one or more components for amplifying and/or sequencing the enriched library (e.g., as described in Example 3); and/or (iv) software for performing statistical analysis (e.g., as described in Example 4).

### Fragment-Based Analysis

[0150] In another aspect, the invention pertains to fragment based analysis of samples, described further in Example 7. There is evidence from the literature that some genetic abnormalities, such as specific types of cancer, can be characterized by and/or associated with fragments in the plasma having a smaller size than the expected size of fragments originating from healthy tissues (Jiang et al, (2015), Proceedings of the National Academy of Sciences, 112(11), pp E1317-E1325). The same hypothesis holds true for fragments originating from the placenta/fetus. Specifically, placenta derived fragments are generally of smaller size when compared to fragments originating from maternal tissues/cells (Chan, K. C. (2004) Clin. Chem. 50:88-92). Accordingly, a fragment size-based test was developed and assessed, demonstrating its ability to identify samples harboring chromosomal abnormalities.

[0151] Thus, the fragments-based detection may be used to detect abnormalities in mixed samples with low signal-to-noise ratio. For example, a binomial test of proportions, as described Example 4, can be used for the detection of increased presence of nucleic acid material originating from fetal cells based on fragment size. In particular, under the null hypothesis that the distribution of fragment sizes originating from both fetal and maternal cells is the same, a binomial test for proportions (as described in Example 4) using continuity correction can be utilized to quantify any evidence against it. Furthermore, since the size of fragments is associated with the origin of cell free DNA from specific tissues (Chan, K. C. (2004) Clin. Chem. 50:88-92) they can also be leveraged for the detection of small-sized mutations, such as point mutations and mutational signatures. In particular, for purposes of detection only certain sizes of fragments may be utilized towards the analysis and as such increasing the signal-to-noise ratio of the data across the various classification/detection methods.

### EXAMPLES

[0152] The present invention is further illustrated by the following examples, which should not be construed as further limiting. The contents of all references, appendices, Genbank entries, patents and published patent applications cited throughout this application are expressly incorporated herein by reference in their entirety.

### Example 1: Maternal Sample Collection and Library Preparation

[0153] The general methodology for the TACS-based multiplexed parallel analysis approach for genetic assessment is shown schematically in FIG. 1. In this example, methods for collecting and processing a maternal plasma sample (containing maternal and fetal DNA), followed by sequencing library preparation for use in the methodology of FIG. 1 are described.

### Sample Collection

[0154] Plasma samples were obtained anonymously from pregnant women after the 10th week of gestation. Protocols used for collecting samples for our study were approved by the Cyprus National Bioethics Committee, and informed consent was obtained from all participants.

### Sample Extraction

[0155] Cell Free DNA was extracted from 2-4 ml plasma from each individual using a manual or automated extraction method suitable for cell free DNA isolation such as for example, but not limited to, Qiasymphony protocol suitable for cell free fetal DNA isolation (Qiagen) (Koumbaris, G. et al. (2016) Clinical chemistry, 62(6), pp. 848-855).

### Sequencing Library Preparation

[0156] Extracted DNA from maternal plasma samples was used for sequencing library construction. Standard library preparation methods were used with the following modifications. A negative control extraction library was prepared separately to monitor any contamination introduced during the experiment. During this step, 5′ and 3′ overhangs were filled-in, by adding 12 units of T4 polymerase (NEB) while 5′ phosphates were attached using 40 units of T4 polynucleotide kinase (NEB) in a 100 μl reaction and subsequent incubation at 25° C. for 15 minutes and then 12° C. for 15 minutes. Reaction products were purified using the MinElute kit (Qiagen). Subsequently, adaptors P5 and P7 (see adaptor preparation) were ligated at 1:10 dilution to both ends of the DNA using 5 units of T4 DNA ligase (NEB) in a 40 μl reaction for 20 minutes at room temperature, followed by purification using the MinElute kit (Qiagen). Nicks were removed in a fill-in reaction with 16 units of Bst polymerase (NEB) in a 40 μl reaction with subsequent incubation at 65° C. for 25 minutes and then 12° C. for 20 minutes. Products were purified using the MinElute kit (Qiagen). Library amplification was performed using a Fusion polymerase (Herculase II Fusion DNA polymerase (Agilent Technologies) or Pfusion High Fidelity Polymerase (NEB)) in 50 μl reactions and with the following cycling conditions, 95° C. for 3 minutes; followed by 10 cycles at 95° C. for 30 seconds, 60° C. for 30 seconds, 72° C. for 30 seconds and finally 72° C. for 3 minutes (Koumbaris, G. et al. (2016) Clinical chemistry, 62(6), pp. 848-855). The final library products were purified using the MinElute Purification Kit (Qiagen) and measured by spectrophotometry.

### Adaptor Preparation

[0157] Hybridization mixtures for adapter P5 and P7 were prepared separately and incubated for 10 seconds at 95° C. followed by a ramp from 95° C. to 12° C. at a rate of 0.1° C./second. P5 and P7 reactions were combined to obtain a ready-to-use adapter mix (100 UM of each adapter). Hybridization mixtures were prepared as follows: P5 reaction mixture contained adaptor P5_F (500 μM) at a final concentration of 200 UM, adaptor P5+P7_R (500 μM) at a final concentration of 200 μM with 1× oligo hybridization buffer. In addition, P7 reaction mixture contained adaptor P7_F (500 μM) at a final concentration of 200 μM, adapter P5+P7_R(500 μM) at a final concentration of 200 UM with 1× oligo hybridization buffer (Koumbaris, G. et al. (2016) Clinical chemistry, 62(6), pp. 848-855). Sequences were as follows, wherein *=a phosphorothioate bond (PTO) (Integrated DNA Technologies):

adaptor P5_F:
(SEQ ID NO: XX)
A*C*A*C*TCTTTCCCTACACGACGCTCTTCCG*A*T*C*T
adaptor P7_F:
(SEQ ID NO: YY)
G*T*G*A*CTGGAGTTCAGACGTGTGCTCTTCCG*A*T*C*T,
adaptor_P5+P7_R:
(SEQ ID NO: ZZ)
A*G*A*T*CGGAA*G*A*G*C.

### Example 2: TArget Capture Sequences (TACS) Design and Preparation

[0158] This example describes preparation of custom TACS for the detection of whole or partial chromosomal abnormalities for chromosomes 13, 18, 21, x, Y or any other chromosome, as well as other genetic abnormalities, such as but not limited to, microdeletion/microduplication syndromes, translocations, inversions, insertions, and other point or small size mutations. The genomic target-loci used for TACS design were selected based on their GC content and their distance from repetitive elements (minimum 50 bp away). TACS size can be variable. In one embodiment of the method the TACS range from 100-500 bp in size and are generated through a PCR-based approach as described below. The TACS were prepared by simplex polymerase chain reaction using standard Taq polymerase, primers designed to amplify the target-loci, and normal DNA used as template. The chromosomal regions used to design primers to amplify suitable loci on chromosomes 13, 18, 21 and X, to thereby prepare the pool of TACS for analysis of chromosomes 13, 18, 21 and X, are shown in FIG. 2.

[0159] All custom TACS were generated using the following cycling conditions: 95° C. for 3 minutes; 40 cycles at 95° C. for 15 seconds, 60° C. for 15 seconds, 72° C. for 12 seconds; and 72° C. for 12 seconds, followed by verification via agarose gel electrophoresis and purification using standard PCR clean up kits such as the Qiaquick PCR Purification Kit (Qiagen) or the NucleoSpin 96 PCR clean-up (Mackerey Nagel) or the Agencourt AMPure XP for PCR Purification (Beckman Coulter). Concentration was measured by Nanodrop (Thermo Scientific).

### Example 3: TACS Hybridization and Amplification

[0160] This example describes the steps schematically illustrated in FIG. 1 of target capture by hybridization using TACS, followed by quantitation of captured sequences by Next Generation Sequencing (NGS).

### TACS Biotinylation

[0161] TACS were prepared for hybridization, as previously described (Koumbaris, G. et al. (2016) Clinical chemistry, 62(6), pp. 848-855), starting with blunt ending with the Quick Blunting Kit (NEB) and incubation at room temperature for 30 minutes. Reaction products were subsequently purified using the MinElute kit (Qiagen) and were ligated with a biotin adaptor using the Quick Ligation Kit (NEB) in a 40 μl reaction at RT for 15 minutes. The reaction products were purified with the MinElute kit (Qiagen) and were denatured into single stranded DNA prior to immobilization on streptavidin coated magnetic beads (Invitrogen).

### TACS Hybridization

[0162] Amplified libraries were mixed with blocking oligos (Koumbaris, G. et al. (2016) Clinical chemistry, 62(6), pp. 848-855) (200 μM), 5 μg of Cot-1 DNA (Invitrogen), 50 μg of Salmon Sperm DNA (Invitrogen), Agilent hybridization buffer 2×, Agilent blocking agent 10×, and were heated at 95° C. for 3 minutes to denature the DNA strands. Denaturation was followed by 30 minute incubation at 37° C. to block repetitive elements and adaptor sequences. The resulting mixture was then added to the biotinylated TACS. All samples were incubated in a rotating incubator for 12-48 hours at 66° C. After incubation, the beads were washed as described previously and DNA was eluted by heating (Koumbaris, G. et al. (2016) Clinical chemistry, 62(6), pp. 848-855). Eluted products were amplified using outer-bound adaptor primers. Enriched amplified products were pooled equimolarly and sequenced on a suitable platform.

[0163] If appropriate, amplification may be biased toward amplification of specific/desired sequences. In one embodiment of the method, this is performed when amplification is performed in the presence of sequences that hybridize to the undesired sequence of interest, and as such block the action of the polymerase enzyme during the process. Hence, the action of the amplification enzyme is directed toward the sequence of interest during the process.

### Example 4: Bioinformatics Sample Analysis

[0164] This example describes representative statistical analysis approaches for use in the methodology illustrated in FIG. 1 (“analysis pipeline” in FIG. 1).

### Human Genome Alignment

[0165] For each sample, the bioinformatic pipeline routine described below was applied in order to align the sample's sequenced DNA fragments to the human reference genome. Targeted paired-end read fragments obtained from NGS results were processed to remove adaptor sequences and poor quality reads (Q-score<25) using the cutadapt software (Martin, M. et al. (2011) EMB.netJournal 17.1). The quality of the raw and/or processed reads as well as any descriptive statistics which aid in the assessment of quality check of the sample's sequencing output were obtained using the FastQC software (Babraham Institute (2015) FastQC) and/or other custom-built software. Processed reads which were at least 25 bases long were aligned to the human reference genome built hg19 (UCSC Genome Bioinformatics) using the Burrows-Wheel Alignment algorithm (Li, H. and Durbin, R. (2009) Bioinformatics 25:1754-1760) but other algorithms known to those skilled in the art may be used as well. If relevant, duplicate reads were removed post-alignment. Where applicable, sequencing output pertaining to the same sample but processed on separate sequencing lanes, was merged to a single sequencing output file. The removal of duplicates and merging procedures were performed using the Picard tools software suite (Broad Institute (2015) Picard) and/or the Sambamba tools software suite (Tarasov, Artem, et al. “Sambamba: fast processing of NGS alignment formats.” Bioinformatics 31.12 (2015): 2032-2034.). A realignment procedure, using tools known to those in the art, may also be performed.

[0166] The above software analysis resulted in a final aligned version of a sequenced sample against the human reference genome and all subsequent steps were based on this aligned version. Information in terms of Short Nucleotide Polymorphisms (SNPs) at loci of interest was obtained using bcftools from the SAMtools software suite (Li, H. et al. (2009) Bioinformatics 25:2078-2079) and/or other software known to those skilled in the art. The read-depth per base, at loci of interest, was obtained using the mpileup option of the SAMtools software suite, from here on referred to as the mpileup file. Information pertaining to the size of the aligned fragments was obtained using the view option of the SAMtools software suite, from here on referred to as the fragment-sizes file and/or other software known to those skilled in the art.

[0167] The mpileup file and the fragment-sizes file were processed using custom-build application programming interfaces (APIs) written in the Python and R programming languages (Python Software Foundation (2015) Python; The R Foundation (2015) The R Project for Statistical Computing). The APIs were used to determine the ploidy state of chromosomes of interest, and/or other genetic abnormalities in regions of interest across the human genome, using a series of steps (collectively henceforth referred to as the “algorithm”) and to also collect further descriptive statistics to be used as quality check metrics, such as but not limited to fetal fraction quantification (collectively henceforth referred to as the “QC metrics”). The APIs can also be used for the assessment of genetic abnormalities from data generated when applying the described method in cases of multiple gestation pregnancies, as well as other genetic abnormalities such as, but not limited to, microdeletions, microduplications, copy number variations, translocations, inversions, insertions, point mutations and mutational signatures.

### QC Metrics

[0168] QC metrics were used to inspect an aligned sample's properties and decide whether the sample was suitable to undergo classification. These metrics were, but are not limited to:
[0169] (a) The enrichment of a sample. The patterns of enrichment are indicative of whether a sample has had adequate enrichment across loci of interest in a particular sequencing experiment (herein referred to as a “run”). To assess this, various metrics are assessed, non-limiting examples of which are:
   [0170] (i) overall sample on-target read depth,
   [0171] (ii) sample on-target sequencing output with respect to total mapped reads,
   [0172] (iii) individual TACS performance in terms of achieved read-depth,
   [0173] (iv) kurtosis and skewness of individual TACS enrichment,
   [0174] (v) kurtosis and skewness moments that arise from all TACS,
   [0175] (vi) fragment size distribution,
   [0176] (vii) percentage of duplication
   [0177] (viii) percentage of paired reads and,
   [0178] (ix) percentage of aligned reads,
      if applicable.
      The above checks are also taken into consideration with regards to GC-bias enrichment. Samples that fail to meet one or more of the criteria given above are flagged for further inspection, prior to classification.
[0179] (b) A sample's fetal fraction or fraction of interest. Samples with an estimated fetal fraction, or fraction of interest, that is below a specific threshold are not classified. Furthermore, if applicable the fraction of interest may be calculated using more than one method and concordance of results between estimation methods may be used as an additional QC prior to classification.

### The Algorithm

[0180] The algorithm is a collection of data processing, mathematical and statistical model routines arranged as a series of steps. The algorithm's steps aim in deciding the relative ploidy state of a chromosome of interest with respect to all other chromosomes of the sequenced sample and is used for the detection of whole or partial chromosomal abnormalities for chromosomes 13, 18, 21, X, Y or any other chromosome, as well as other genetic abnormalities such as, but not limited to, microdeletion/microduplication syndromes and other point or small size mutations. As such the algorithm can be used, but is not limited to, the detection of whole or partial chromosomal abnormalities for chromosomes 13, 18, 21, X,Y or any other chromosome, as well as other genetic abnormalities such as, but not limited to, microdeletions, microduplications, copy number variations, translocations, inversions, insertions, point mutations and other mutational signatures. The algorithm carries out, but is not limited to, two types of assessments, one pertaining to the read-depth information of each sample and the other to the distribution of fragment-sizes, across TACS-specific regions. One or more statistical tests may be associated with each type of assessment, non-limiting examples of which are given in the statistical methods described herein.

[0181] In the case of read-depth associated tests, the algorithm compares sequentially the read-depth of loci from each chromosome of interest (herein referred to as the test chromosome) against the read-depth of all other loci (herein referred to as the reference loci) to classify its ploidy state. For each sample, these steps were, but are not limited to:
[0182] (a) Removal of inadequately sequenced loci. The read-depth of each locus was retrieved. Loci that have not achieved a minimum number of reads, were considered as inadequately enriched and were removed prior to subsequent steps.
[0183] (b) Genetic (GC-content) bias alleviation. The sequencing procedure may introduce discrepancies in read-depth across the loci of interest depending on their GC content. To account for such bias, a novel sequence-matching approach that increases both sensitivity and specificity to detect chromosomal aneuploidies was employed. The GC content of each locus on the test chromosome was identified and similar genetic loci were grouped together to form genetically matched groups. The procedure was repeated for the reference loci. Then, genetically matched groups from the test chromosome were conditionally paired with their genetically matched group counterparts on the reference chromosome(s). The groups may have any number of members. The conditionally matched groups were then used to assess the ploidy status of test chromosomes.
[0184] (c) Genetic abnormality determination. Ploidy status determination, or other genetic abnormalities of interest such as but not limited to microdeletions, microduplications, copy number variations, translocations, inversions, insertions, point mutations and other mutational signatures was achieved using a single statistical method and/or a weighted score approach on the result from the following, but not limited to, statistical methods:

[0185] Statistical Method 1: The differences in read-depth of the conditionally paired groups were tested for statistical significance using the t-test formula:

$$\\ t = \frac{\hat{x} - μ}{s / \sqrt{n}}$$

where t is the result of the t-test, is the average of the differences of the conditionally paired groups, μ is the expected read-depth and is set to a value that represents insignificant read-depth differences between the two groups, s the standard deviation of the differences of the conditionally paired groups and n the length of the vector of the conditionally paired differences. The magnitude of the t-score was then used to identify evidence, if any, against the null hypothesis of same ploidy between reference and test chromosomes. Specifically, t>=c1 (where c1 is a predefined threshold belonging to the set of all positive numbers) shows evidence against the null hypothesis of no difference.

[0186] Statistical Method 2: Bivariate nonparametric bootstrap. The bootstrap method depends on the relationship between the random variables X (read-depth of reference loci) and Y (read-depth of test loci). Here, the read depth of baits on the reference group (random variable denoted by X) were treated as the independent covariate. The first step of the iterative procedure involved random sampling with replacement (bootstrapping) of the read-depths of loci on the reference chromosomes, i.e. (x1,g1), . . . , (xn,gn), where the parameter g is known and denotes the GC-content of the chosen bait. Then, for each randomly selected reference bait (xi,gi), a corresponding read depth was generated for a genetically matched locus i.e (y1,g1), . . . , (yn,gn). Thus, the bivariate data (x1,y1), (x2,y2), . . . , (xn,yn) was arrived at, which was conditionally matched on their GC-content (parameter gi). The differences between the read depths of the genetically matched bootstrapped values xi and yi were used to compute the statistic of interest in each iteration. In one embodiment this statistical measure can be, but is not limited to, the mode, mean or median of the recorded differences, and/or multiples thereof. The procedure was repeated as necessary to build up the distribution of the statistic of interest from these differences. The sample was assigned a score that corresponds to a specific percentile of the built distribution (e.g. 5^{th} percentile). Under the null hypothesis the ploidy between chromosomes in the reference and test groups is not different. As such, samples whose score for a particular chromosome, was greater than a predefined threshold, say c2, were classified as statistically unlikely to have the same ploidy. Other statistical measures may be employed.

[0187] Statistical Method 3: Stratified permutation test. The statistic of interest is the read-depth estimate of the test chromosome, denoted by, Ŷ_{obs} which is calculated using all loci of the test chromosome's genetically matched groups as follows:

$$\\ {\hat{Y}}_{obs} = \frac{{\sum }_{j = 1}^{j = T} {\sum }_{i = 1}^{i = Nj} {y}_{ij}}{{\sum }_{j = 1}^{j = T} N j}$$

where yᵢⱼ is the read-depth of locus i part of the genetically matched group j (i.e., loci belonging to a specific group based on their GC-content), Nj is the number of test loci part of the genetically matched group j and T the number of genetically matched groups.

[0188] Subsequently, a null distribution to test Ŷ_{obs} was built. To do so, for each group j, the test and reference loci were combined (exchangeability under the null hypothesis), and each group j was sampled randomly up to Nj times without replacement (stratified permutation). This created a vector of values, say yi, and from this the vector's average value, say, was calculated. The procedure was repeated as necessary to build the null distribution. Finally, Ŷ_{obs} was studentised against the null distribution using the formula:

$$\\ {Z}_{Yobs} = \frac{{Y}^{} {}_{obs}^{\hat{}} - \hat{Y}}{{σ}_{Y}}$$

where Ŷ and σ_{Y} are the first and square root of the second moment of all permuted ýᵢ statistic values. Samples whose Z_{Yobs} was greater than a predefined threshold, say c3, were statistically less likely to have the same ploidy in the reference and test groups.

[0189] In the case of fragment-size associated tests, the algorithm computes the proportion of small-size fragments found in test-loci and compares it with the respective proportion in reference-loci as described in Statistical Method 4 below.

[0190] Statistical Method 4: Fragment Size Proportions. For each sample the number and size of fragments aligned onto the human reference genome at the corresponding TACS coordinates, is extracted. The data is subsequently filtered so as to remove fragment-sizes considered statistical outliers using the median outlier detection method. Specifically, outliers are defined as those fragments whose size is above or below the thresholds, Fₜₕᵣ, set by equation:

$$\\ {F}_{thr} = {F}_{median} \pm ( X \times IQR )$$

where F_{median} is the median fragment-size of all fragments of a sample, X is a variable that can take values from the set of R+, and IQR is the interquartile range of fragment sizes. Thereafter, a binomial test of proportions is carried out to test for supporting evidence against the null hypothesis, H0, where this is defined as:
[0191] H0: The proportion of small fragments of the test-region is not different from the proportion of small-fragments of the reference region.
   In various embodiments of the invention, small fragments are defined as those fragments whose size is less than or equal to a subset of Z+that is upper-bounded by 160 bp. If the set of all TACS are defined as T, then the test region can be any proper subset S which defines the region under investigation, and the reference region is the relative complement of S in T. For example, in one embodiment of the invention, the set S is defined by all TACS-captured sequences of chromosome 21 and thus the reference set is defined by all TACS-captured fragments on the reference chromosomes, and/or other reference loci
   The alternative hypothesis, H1, is defined as:
[0192] H1: The proportion of small fragments of the test-region is not equal to the proportion of test fragments of the reference region.
   As such, and taking into account continuity correction, the following score is computed (Brown et. al, Harrel):

$$\\ {W}_{test} = ( {p}^{′} - {p}_{ref} ) / \sqrt{\frac{{p}^{′} ( 1 - {p}^{′} )}{{N}_{test}}} where$$

$$\\ {p}^{′} = \frac{( {F}^{′} + 0.5 )}{( {N}_{test} + 1 )}$$

$$\\ {p}_{ref} = \frac{( {F}_{ref} + 0.5 )}{( {N}_{ref} + 1 )}$$

\acute{F} is the number of small-size fragments on the test-region, F_{ref} the number of small size fragments on the reference region, Nₜₑₛₜ the number of all fragments on the test region and N_{ref} the number of all fragments on the reference region.

[0193] For each sample, the algorithm tests sequentially the proportion of fragment sizes of regions under investigation (for example, but not limited to, chromosome 21, chromosome 18, chromosome 13 or other (sub)chromosomal regions of interest) against reference regions; those not under investigation at the time of testing. For each sample a score is assigned for each test. Scores above a set-threshold, say c4, provide evidence against the null hypothesis.

[0194] Weighted Score method 1: In one embodiment of the method, a weighted score was attributed to each sample s, computed as a weighted sum of all statistical methods using the formula:

$$\\ {V}_{s} ( R , F ) = {z}_{1} max \{ {R}_{s} , {F}_{s} \} + ( 1 - {z}_{1} ) min \{ {R}_{s} , {F}_{s} \}$$

where Rₛ is the run-specific corrected score arising from a weighted contribution of each read-depth related statistical method for sample s and is defined as:

$$\\ {R}_{s} = \frac{( {\sum }_{i} {w}_{i} {S}_{is} - {{R}^{′}}_{r} )}{{σ}_{r}}$$

and Ŕᵣ is the run-specific median value calculated from the vector of all unadjusted read-depth related weighted scores that arise from a single sequencing run, and σᵣ is a multiple of the standard deviation of R scores calculated from a reference set of 100 euploid samples. The terms max{Rₛ, Fₛ} and min{Rₛ, Fₛ} denote the maximum and minimum values of the bracketed set, respectively.
Fₛ is the run-specific corrected score arising from the fragment-size related statistical method and is defined as:

$$\\ {F}_{s} = \frac{( {W}_{test} - {{R}^{′}}_{f} )}{{σ}_{f}}$$

where Wₜₑₛₜ is as defined earlier, Ŕ_{f} is the run specific median calculated from the vector of all unadjusted fragment-related statistical scores that arise from a single sequencing run, and σ_{f} is a multiple of the standard deviation of F scores calculated from a reference set of 100 euploid samples.

[0195] A unique classification score of less than a predefined value indicates that there is no evidence from the observed data that a sample has a significant risk of aneuploidy.

[0196] Weighted Score method 2: In another embodiment of the method, the weighted score arising from the statistical methods described above was used to assign each sample a unique genetic abnormality risk score using the formula:

$$\\ R ( t , c ) = {\sum }_{j = 0}^{j = N} {w}_{j} \frac{{t}_{j}}{{c}_{j}}$$

where R is the weighted score result, wⱼ the weight assigned to method j, tⱼ the observed score resulting from method j, and cⱼ the threshold of method j.

[0197] A unique classification score of less than a predefined value indicates that there is no evidence from the observed data that a sample has a significant risk of aneuploidy.

[0198] Since all read depths from baits in the reference group were assumed to be generated from the same population, and in order to have a universal threshold, run-specific adjustments were also employed to alleviate run-specific biases.

[0199] The aforementioned method(s), are also suitable for the detection of other genetic abnormalities, such as but not limited to, subchromosomal abnormalities. A non-limiting example is the contiguous partial loss of chromosomal material leading to a state of microdeletion, or the contiguous partial gain of chromosomal material leading to a state of microduplication. A known genetic locus subject to both such abnormalities is 7q11.23. In one embodiment of statistical method 1, synthetic plasma samples of 5%, 10% and 20% fetal material were tested for increased risk of microdeletion and/or microduplication states for the genetic locus 7q11.23.

[0200] For point mutations various binomial tests are carried out that take into consideration the fetal fraction estimate of the sample, f, the read-depth of the minor allele, r, and the total read-depth of the sequenced base, n. Two frequent, yet non-limiting examples involve assessment of the risk when the genetic abnormality is a recessive point mutation or a dominant point mutation.

[0201] In the non-limiting example of a recessive point mutation the null hypothesis tested is that both the mother and the fetus are heterozygous (minor allele frequency is 0.5) against the alternative in which the fetus is homozygous (minor allele frequency is 0.5-f/2). A small p-value from the corresponding likelihood ratio test would indicate evidence against the null. In the non-limiting example of a dominant point mutation the null hypothesis tested is that the mother and fetus are homozygous at the given position against the alternative in which only the fetus is heterozygous for the given position. A small p-value from the corresponding likelihood ratio test would indicate evidence against the null.

[0202] In addition to the above, fetal sex determination methods were also developed, with non-limiting examples given below. In one embodiment of the invention, fetal sex was assigned to a sample using a Poisson test using the formula:

$$\\ Pr ( {r}_{y} \leq k ) = {e}^{- λ} {\sum }_{i = 0}^{i = k} \frac{{t}_{j}}{il}$$

where:

$$\\ λ = \frac{f B μ}{2}$$

and f is the fetal fraction estimate of the sample, B is the number of target sequences on chromosome Y, μ is the read-depth of the sample and k is the sum of reads obtained from all targets B. The null hypothesis of the Poisson test was that the sample is male. A value of Pr(r_{y}) less than a threshold c_{y} was considered as enough evidence to reject the null hypothesis, i.e. the sample is not male. If any of the terms for computing Pr(r_{y}) were unavailable, then the sample's sex was classified as NA (not available).

[0203] In another embodiment of the invention, fetal sex was assigned using the average read-depth of target sequences on chromosome Y. If the average read-depth of the target-sequences was over a predefined threshold, where such threshold may be defined using other sample-specific characteristics such as read-depth and fetal-fraction estimate, the fetal sex was classified as male. If the average read-depth was below such threshold then the sample was classified as female.

### Fetal Fraction Estimation/Fraction of Interest Estimation

[0204] Several methods have been developed to estimate fetal fraction that can be applied to singleton and/or to multiple gestation pregnancies. As such, and dependent on the type of pregnancy, the fetal fraction estimate can be obtained from either method or as a weighted estimate from a subset and/or all developed methods. Some non-limiting examples are given below.

[0205] In one embodiment, a machine learning technique has been developed based on Bayesian inference to compute the posterior distribution of fetal DNA fraction using allelic counts at heterozygous loci in maternal plasma of singleton pregnancies. Three possible informative combinations of maternal/fetal genotypes were utilized within the model to identify those fetal DNA fraction values that get most of the support from the observed data.

[0206] Let f denote the fetal DNA fraction. If the mother is heterozygous at a given genomic locus, the fetal genotype can be either heterozygous or homozygous resulting in expected minor allele frequencies at 0.5 and 0.5-f/2, respectively. If the mother is homozygous and the fetus is heterozygous then the expected minor allele frequency will be f/2. A Markov chain Monte Carlo method (a Metropolis-Hastings algorithm) (The R Foundation (2015) The R Project for Statistical Computing) was used with either a non-informative or an informative prior (i.e. incorporate additional information such as gestational age, maternal weight etc.) to obtain a sequence of random samples from the posterior probability distribution of fetal DNA fraction that is based on a finite mixture model.

[0207] In another embodiment, the fetal fraction estimate is computed only from the fetus-specific minor allele frequency (MAF) cluster, i.e., the cluster formed when the mother is homozygous and the fetus is heterozygous for a given genomic locus. It is assumed that the mean value of the fetal fraction estimate is normally distributed as N (2\acute{x}, σ_{\acute{x}}), where \acute{x} is the mean of the fetus-specific MAF, and σ_{\acute{x}} is the standard deviation of the fetus-specific MAF. The fetal fraction estimate is then obtained from percentiles of the computed distribution, N (2\acute{x}, σ_{\acute{x}}).

[0208] For multiple gestation pregnancies, non-limiting examples of which include monozygotic and dizygotic twin pregnancies, triplet pregnancies and various egg and/or sperm donor cases, the fetal fraction can be estimated using information obtained from heterozygous genetic loci whose MAF value is less than a threshold, say Mₜₕᵣₑₛₕ, and derived from potential fetus-specific SNPs. The ordinarily skilled artisan will appreciate that fetus specific SNPs can originate from any fetus, or from any possible combination of the fetuses or from all the fetuses of the gestation. As such, an algorithm that estimates the fetal fraction of the fetus with the smallest contribution to the total fetal content, by taking into account the combinatorial contribution of each fetus to the MAF values that define fetus-specific SNPs, and also allows for inhomogeneous contribution of fetal material to the total fetal content of plasma derived material has been developed. To this effect, a two-step approach is employed by the algorithm.

[0209] In one embodiment of the algorithm, the multiple gestation pregnancy under consideration is a dizygotic twin pregnancy. As a first step, the algorithmic implementation of the model utilizes all informative SNPs and allows for inhomogeneous fetal contribution that can be explained with a fold-difference in fetal fraction estimates of a set threshold, say cf. Specifically, if f1 and f2 represent the fetal fractions of fetus one and fetus two, and f1<=f2, then the assumption is that f2<=cf f1, with cf being a positive real number greater than or equal to 1. Under this assumption, the observed data D, defined as counts of the alternate and reference alleles at informative SNP loci, are believed to be generated from a mixture distribution of three Binomials (defined by parameters, f1/2, f2/2 and (f1+f2)/2), with the posterior distribution p(f1,f2|D) being proportional to the observational model which can be written as p(f1|f2,D) p(f2|D). The posterior distribution p(f1,f2|D) is sampled with an MCMC Metropolis-Hastings algorithm using a uniform prior. The empirical quantile approach is performed on the generated data array to infer the fetal fractions.

[0210] As a second step, the algorithm runs a model-based clustering algorithm (Finite Gaussian mixture modeling fitted via EM algorithm; R-package: mclust) to identify whether there exists a separate outlier SNP cluster which is believed to be centered around f1/2. Existence of such a cluster with a mean invalidating the cf>=f2/f1 assumption, leads to estimation of f1 using only SNPs part of the identified cluster.

[0211] The methods described above are suited to the determination of the fraction of any component of interest part of a mixed sample. As such, the methods are not to be understood as applicable only to the application of fetal fraction estimation and can be applied to the estimation of any component of interest part of a mixed sample.

### Example 5: Target Enrichment Using Families of TACS

[0212] In this example, a family of TACS, containing a plurality of members that all bind to the same target sequence of interest, was used for enrichment, compared to use of a single TACS binding to a target sequence of interest. Each member of the family of TACS bound to the same target sequence of interest but had a different start and/or stop coordinates with respect to a reference coordinate system for that target sequence (e.g., the human reference genome built hg19). Thus, when aligned to the target sequence, the family of TACS exhibit a staggered binding pattern, as illustrated in FIG. 3. Typically, the members of a TACS family were staggered approximately 5-10 base pairs.

[0213] A family of TACS containing four members (i.e., four sequences that bound to the same target sequence but having different start/stop positions such that the binding of the members to the target sequence was staggered) was prepared. Single TACS hybridization was also prepared as a control. The TACS were fixed to a solid support by labelling with biotin and binding to magnetic beads coated with a biotin-binding substance (e.g., streptavidin or avidin) as described in Example 3. The family of TACS and single TACS were then hybridized to a sequence library, bound sequences were eluted and amplified, and these enriched amplified products were then pooled equimolarly and sequenced on a suitable sequencing platform, as described in Example 3.

[0214] The enriched sequences from the family of TACS sample and the single TACS sample were analyzed for read-depth. The results are shown in FIGS. 4A and 4B. As shown in FIG. 4A, target sequences of interest enriched using the family of four TACS (red dots) exhibited a fold-change in read-depth when compared to control sequences that were subjected to enrichment using only a single TACS (blue dots). Fold-change was assessed by normalizing the read-depth of each locus by the average read-depth of a sample, wherein the average read-depth was calculated from all loci enriched with a single TACS. As shown in FIG. 4B, an overall 54.7% average increase in read-depth was observed using the family of four TACS.

[0215] This example demonstrates that use of a family of TACS, as compared to a single TACS, results in significantly improved enrichment of a target sequence of interest resulting in significantly improved read-depth of that sequence.

### Example 6: Quantification of Variant Alleles in Mixed Samples Containing

[0216] Maternal DNA at Loci Associated with Genetic Conditions

[0217] Mixed samples, containing both maternal and fetal DNA, were processed as described in Example 1. Families of TACS were designed for the detection of inheritable genetic conditions associated with 5 different genetic abnormalities (β-thalassemia, phenylketonuria, cystic fibrosis, Gauchers' disease and autosomal recessive polycystic kidney disease). The members of the TACS families were designed such that they had staggered start and/or stop positions for binding to the target sequence of interest, as described in Example 5. Furthermore, the members of the TACS families were designed to have the optimized features with respect to their size, distance from repetitive elements and GC content, as described in Example 2.

[0218] The TACS methodology illustrated in FIG. 1 (and described in Examples 1-3) was used with the families of TACS for enhanced enrichment of target sequences of interest containing specific sequences relevant to the determination of maternal carrier status for five inheritable genetic conditions (β-thalassemia, phenylketonuria, cystic fibrosis, Gauchers' disease and autosomal recessive polycystic kidney disease). To determine the maternal carrier status for these genetic conditions, analysis was conducted across 14 different genes, covering a total of 157 loci. Optionally, the maternal sample can be simultaneously interrogated with TACS (or families of TACS) for detecting fetal chromosomal abnormalities (e.g., aneuploidies, such as for chromosomes 13, 18, 21, X and Y, as described herein).

[0219] Targeted sequencing products obtained from Next Generation Sequencing (NGS) results were processed to remove adaptor sequences and poor quality reads. Reads whose length was at least 25 bases long post adaptor-removal were aligned to the human reference genome built hg19. If relevant, duplicate reads are removed post-alignment. Where applicable, sequencing output pertaining to the same sample but processed on separate sequencing lanes was merged to a single sequencing output file. Software analysis provided a final aligned version of a sequenced sample against the human reference genome from which information can then be extracted in terms of Single Nucleotide Polymorphisms (SNPs), Single Nucleotide Variants (SNVs) and other genetic variations with respect to a reference sequence at loci of interest, read-depth per base and the size of aligned fragments. The maternal sample can be fully processed using the pipeline described in Examples 1-4 to determine the ploidy status of the fetus. In addition to this, information in terms of SNVs and indels at loci of interest concerning the sequence and number of times each SNV is present in a sequenced sample was detected and was used to infer the presence and carrier status the maternal sample using binomial statistics as described herein.

[0220] Data in the form of calculated Variant Allele Frequencies (VAFs) from mixed samples, containing both maternal and fetal DNA, are presented in FIG. 5. The Variant Allele Frequency was computed as the number of times the variant allele was sequenced over the number of times the locus was sequenced. The x-axis is an index of the different samples analyzed. The y-axis is the value of the Variant Allele Frequency of a sample (VAF %). The value of the VAF is based on the maternal fraction present in the mixed sample. A carrier of the variant allele would be expected to have a VAF of around 50%. However, a pregnant woman who is a carrier would be expected to have a VAF value around 50% minus half the fetal fraction value since a mixed sample contains both fetal and maternal DNA. Thus, if for example a mixed sample has an estimated fetal fraction of 10% then the maternal fraction is 90%. Thus, it is expected that maternal carrier status for autosomes (i.e. non-sex chromosomes) would have a VAF value near 45%. A similar line of reasoning may be used for sex-linked diseases where one has to take into account the sex of the fetus before estimating expected VAFs. Large value VAFs appear at the top of the plot indicating maternal carrier status (colored dots; color scheme dependent on disease status as described in the legend of FIG. 5).

[0221] For those mixed maternal/fetal samples having positive maternal carrier status, a paternal sample is then processed in order to compute the paternal carrier status and determine the fetal risk of inheriting the genetic condition. A paternal sample (e.g., plasma sample) also undergoes the TACS methodology illustrated in FIG. 1, as described herein, using families of TACS directed to those loci for which maternal sample has been determined to have positive carrier status. The sequencing data are aligned as described for the maternal sample and information in terms of Short Nucleotide Variants (SNVs) at loci of interest, read-depth per base and the size of aligned fragments is obtained. Using this information the presence and carrier status of the paternal sample is inferred using binomial statistics.

[0222] Finally, a fetal risk score for inheriting the detected genetic conditions is determined from the data using Mendelian genetics reasoning. An example of a fetal risk score is illustrated below in Table 3, where the algorithms used have detected that the mother is a carrier, with allelic sequence Aa, for a given recessive genetic condition and the father also has been determined to be a carrier, with allelic sequence Aa, for the same given recessive genetic condition.

TABLE 3
Example of Mendelian Genetics Reasoning
for Determining Fetal Risk

| | | Maternal Status | |
|---|---|---|---|
| Possible Fetal Outcomes | | A | a |
| Paternal | A | AA | Aa |
| Status | a | Aa | aa |

[0223] Accordingly, for the allelic combination of Aa, where “A” describes the dominant allele and “a” the recessive disease-associated allele and “Aa” thus implies maternal and paternal carrier of the condition, then the fetus has a 25% chance of having the genetic condition (“aa” homozygous recessive genotype in the lower right corner of Table 3 above).

[0224] In summary, this example demonstrates that the TACS methodology can successfully be used to determine maternal (and, if necessary based on the maternal results, paternal) carrier status for inheritable genetic conditions, thereby allowing for determination of fetal risk of inheriting genetic conditions.

[0225] The VAF is tested using binomial statistics. In the case that the mother is homozygous recessive, the expected value is (1-f), where f is the fetal fraction. As such, the binomial test checks if the VAF value is significantly different from (1-f). That is, the null hypothesis of the test is that the VAF value is not significantly different from (1-f). If we fail to reject the null hypothesis then it is assumed that the mother is homozygous recessive and we revert to testing the father as per the already described procedure.

### Example 7: Fragment Size Based Tests

[0226] There is evidence from the literature that some types of abnormalities, such as specific types of cancer, can be characterized by and/or associated with fragments in the plasma having a smaller size than the expected size of fragments originating from healthy tissues (Jiang et al, (2015), Proceedings of the National Academy of Sciences, 112(11), pp E1317-E1325). Thus, a fragments-size based test can be utilized to detect the presence of somatic copy number variations in individuals suspected of having cancer. To this effect, a binomial test of proportions, as described Example 4, can be used for the detection of increased presence of nucleic acid material originating from non-healthy tissue (e.g., tumor tissue) based on fragment size. In particular, under the null hypothesis that the distribution of fragment sizes originating from both healthy and non-healthy cells (for example, but not limited to cancerous cells) is the same, a binomial test for proportions (as described in Example 4) using continuity correction can be utilized to quantify any evidence against it.

[0227] The same hypothesis holds true for fragments originating from the placenta/fetus. Specifically, placenta derived fragments are generally of smaller size when compared to fragments originating from maternal tissues/cells (Chan, K. C. (2004) Clin. Chem. 50:88-92). Accordingly, assessment of the fragment size-based test was performed using maternal plasma samples (i.e., mixed samples where cell free DNA is of maternal and fetal origin). The size of fragments that have aligned to TACS-enriched regions can be obtained from the aligned data. Subsequently, the proportion of fragments under a specific threshold from a test region is compared respective proportion of fragments from a reference region for evidence against the null hypothesis H0,
[0228] H0: The proportion of small fragments of the test-region is not different from the proportion of small-fragments of the reference region.

[0229] FIG. 6 shows results when applying the fragment sizes method to the mixed sample containing maternal and fetal DNA. The black dots are individual samples. The x-axis shows the sample index. The y-axis shows the score result of the fragments-based method. A score result greater than the one indicated by the threshold, illustrated as a grey line, indicates a deviation from the expected size of fragments illustrating the presence of aneuploidy. The results demonstrate that an aneuploid sample, having an estimated fetal fraction equal to 2.8%, was correctly identified, illustrating that fragments-based detection may be used to detect abnormalities in mixed samples with low signal-to-noise ratio (e.g., as is the case in detection of cancer).

[0230] Accordingly, this example demonstrates the successful ability of the fragments-based detection method in detecting genetic abnormalities in samples with low signal-to-noise ratios, thereby demonstrating the suitability of the fragments-based test for analysis of either cancer samples for oncology purposes or maternal samples for NIPT.

[0231] Since small-sized fragments are associated with fragments from non-healthy tissues (Jiang et al, (2015), Proceedings of the National Academy of Sciences, 112(11), pp E1317-E1325) they can also be leveraged for the detection of small-sized mutations, such as point mutations and mutational signatures. For example, one may only use small-sized fragments in Variant Allele Frequency estimation, thereby increasing the signal-to-noise ratio.

### Example 7: Amniotic Fluid/CVS Example

[0232] Targeted sequencing products obtained from Next Generation Sequencing (NGS) results were processed to remove adaptor sequences and poor quality reads. Reads whose length was at least 25 bases long post adaptor-removal were aligned to the human reference genome built hg19. If relevant, duplicate reads are removed post-alignment. Where applicable, sequencing output pertaining to the same sample but processed on separate sequencing lanes was merged to a single sequencing output file. Local realignment of the data, using tools known in the art, may also be performed. Software analysis provided a final aligned version of a sequenced sample against the human reference genome from which information can then be extracted in terms of Single Nucleotide Polymorphisms (SNPs), Single Nucleotide Variants (SNVs) and other genetic variations with respect to a reference sequence at loci of interest, read-depth per base and the size of aligned fragments.

[0233] Each sample undergoes QC analysis, involving, but not limited to, a read-depth threshold, sample contamination from secondary DNA sources and variance threshold of average read depths of TACS. Samples that do not pass QC thresholds are flagged for further inspection. If a sample passes QC, then it proceeds to the classification stage that involves multiple levels of analysis. In one embodiment, the normalization step involves GC-bias correction using local polynomial regression to get the normalized read depth data that is used for subsequent analysis.

[0234] In one embodiment, each TACS enriched chromosome of interest is tested against the other targeted autosomes that serve as reference. In one embodiment, the test statistic is the ratio of the average read depth of the chromosome of interest over the average read depth of the reference chromosomes. For example, when we test for chromosome 21 aneuploidies a comparison of the average read depth of chr21 TACS with the average read depth of the TACS on other targeted autosomes is performed. A graphical illustration of the results of the method is shown in FIGS. 7 and 8. The example shown in FIG. 7 illustrates a normal male fetus, whilst the example of FIG. 8 illustrates the detection of aneuploidy on chromosome 18 (T18) in a male sample.

[0235] In parallel, the algorithm searches for sub-chromosomal aberrations that span our targeted regions using a Pruned Dynamic Programming segmentation algorithm (Cleynen et al. 2014) and assuming that the data is Normally distributed.

[0236] In one embodiment the algorithm is utilized to detect full chromosome aneuploidies, such as for example but not limited to chr13, 18, 21, X and Y, microdeletion syndromes and sub-chromosomal aberrations.

[0237] In another embodiment, heterozygous loci are utilised to get estimates of the ploidy. MAFs (Minor Allele frequencies at heterozygous loci) can be used to construct various Gaussian Mixtures models (one for the diploid state, and one for the aneuploid state, such as but not limited to trisomy 21, trisomy 18, trisomy 13, trisomy X, monosomy X, or double trisomies of aforementioned chromosomes). A maximum likelihood approach can be used to detect the most likely ploidy status of the sample. FIG. 10 illustrates an example of detection of trisomy 21. Each dot is a MAF value obtained from SNP data. Note the change in the MAF of the SNPs at the right hand side of the plot (chr 21 MAF values), illustrating trisomy 21. FIG. 11 illustrates a normal case (no change in MAF is seen across SNPs). FIG. 9 illustrates the application of the method in triploidy cases (all chromosomes illustrate an extra copy). Note the shift in all MAF values for all SNPs (in comparison with FIG. 5).

[0238] In another embodiment we can also utilise non-overlapping widows of a fixed size and count the number of reads that fall into these bins. If applicable, gross outlier detection and filtering is utilised before proceeding to GC-bias correction using a local polynomial method. As per the already described procedure a pruned dynamic programming segmentation method is applied on the normalized read depths to detect large aberrations genome-wide. FIG. 12 illustrates the application of this method to detect a sub-chromosomal data.

The application's sequence listing, which the Patent Office published only in electronic form, follows.

SEQUENCE LISTING (2550 sequences)

SEQ ID NO: 1 - DNA, 20 bp, Homo sapiens
  source 1..20: mol_type = genomic DNA
tcttctcgttcaagatgccg

SEQ ID NO: 2 - DNA, 22 bp, Homo sapiens
  source 1..22: mol_type = genomic DNA
aaattacatgcaaggctaccac

SEQ ID NO: 3 - DNA, 21 bp, Homo sapiens
  source 1..21: mol_type = genomic DNA
acaggaagaaaggggagttac

SEQ ID NO: 4 - DNA, 20 bp, Homo sapiens
  source 1..20: mol_type = genomic DNA
ttcaggttgtgtgatgtgtc

SEQ ID NO: 5 - DNA, 20 bp, Homo sapiens
  source 1..20: mol_type = genomic DNA
taagcagaggttttgttgcc

SEQ ID NO: 6 - DNA, 20 bp, Homo sapiens
  source 1..20: mol_type = genomic DNA
gtgaagtatttgctgccacc

SEQ ID NO: 7 - DNA, 20 bp, Homo sapiens
  source 1..20: mol_type = genomic DNA
atggtcatctcaacagcaca

SEQ ID NO: 8 - DNA, 20 bp, Homo sapiens
  source 1..20: mol_type = genomic DNA
tccactgacgttgagattcg

SEQ ID NO: 9 - DNA, 20 bp, Homo sapiens
  source 1..20: mol_type = genomic DNA
cgaacctccttgacctctta

SEQ ID NO: 10 - DNA, 22 bp, Homo sapiens
  source 1..22: mol_type = genomic DNA
gttatgttgataggggaagctt

SEQ ID NO: 11 - DNA, 20 bp, Homo sapiens
  source 1..20: mol_type = genomic DNA
aagccctctactccatctgt

SEQ ID NO: 12 - DNA, 20 bp, Homo sapiens
  source 1..20: mol_type = genomic DNA
tcagaactcgtcagtggaag

SEQ ID NO: 13 - DNA, 19 bp, Homo sapiens
  source 1..19: mol_type = genomic DNA
gaagggccagacagcttat

SEQ ID NO: 14 - DNA, 21 bp, Homo sapiens
  source 1..21: mol_type = genomic DNA
atttgctttgtttttgtccct

SEQ ID NO: 15 - DNA, 21 bp, Homo sapiens
  source 1..21: mol_type = genomic DNA
gatcattgctttgtttggacc

SEQ ID NO: 16 - DNA, 21 bp, Homo sapiens
  source 1..21: mol_type = genomic DNA
aggagaggaaaaatcttgacc

SEQ ID NO: 17 - DNA, 20 bp, Homo sapiens
  source 1..20: mol_type = genomic DNA
ctgcctgcagccattattgt

SEQ ID NO: 18 - DNA, 22 bp, Homo sapiens
  source 1..22: mol_type = genomic DNA
ccttggggtatgtttgttatgt

SEQ ID NO: 19 - DNA, 22 bp, Homo sapiens
  source 1..22: mol_type = genomic DNA
actttttctgtatcagtcacgg

SEQ ID NO: 20 - DNA, 20 bp, Homo sapiens
  source 1..20: mol_type = genomic DNA
ctgcttttgtgtgttccctt

SEQ ID NO: 21 - DNA, 20 bp, Homo sapiens
  source 1..20: mol_type = genomic DNA
ccagttcctgtttttctgcc

SEQ ID NO: 22 - DNA, 21 bp, Homo sapiens
  source 1..21: mol_type = genomic DNA
gccttcactgatcctactttc

SEQ ID NO: 23 - DNA, 21 bp, Homo sapiens
  source 1..21: mol_type = genomic DNA
ggatatggggtaggtttttgt

SEQ ID NO: 24 - DNA, 20 bp, Homo sapiens
  source 1..20: mol_type = genomic DNA
actcatagaactggggcttt

SEQ ID NO: 25 - DNA, 20 bp, Homo sapiens
  source 1..20: mol_type = genomic DNA
ctttgtaggtcctccagaga

SEQ ID NO: 26 - DNA, 20 bp, Homo sapiens
  source 1..20: mol_type = genomic DNA
cctgttttcagtgggttgaa

SEQ ID NO: 27 - DNA, 20 bp, Homo sapiens
  source 1..20: mol_type = genomic DNA
ccacgttgtacctttccatg

SEQ ID NO: 28 - DNA, 21 bp, Homo sapiens
  source 1..21: mol_type = genomic DNA
gagattcaaaacagtggtggc

SEQ ID NO: 29 - DNA, 19 bp, Homo sapiens
  source 1..19: mol_type = genomic DNA
acaacactgtccttgggtt

SEQ ID NO: 30 - DNA, 20 bp, Homo sapiens
  source 1..20: mol_type = genomic DNA
taaatgtcctgtgtgctcgg

SEQ ID NO: 31 - DNA, 20 bp, Homo sapiens
  source 1..20: mol_type = genomic DNA
gacaggacacatggagagag

SEQ ID NO: 32 - DNA, 21 bp, Homo sapiens
  source 1..21: mol_type = genomic DNA
aactgatggtgatttgcatgt

SEQ ID NO: 33 - DNA, 20 bp, Homo sapiens
  source 1..20: mol_type = genomic DNA
ggcttctggaaacatcttgc

SEQ ID NO: 34 - DNA, 21 bp, Homo sapiens
  source 1..21: mol_type = genomic DNA
caatagaagtagggggtgagg

SEQ ID NO: 35 - DNA, 20 bp, Homo sapiens
  source 1..20: mol_type = genomic DNA
agctgggatgggttgtttat

SEQ ID NO: 36 - DNA, 20 bp, Homo sapiens
  source 1..20: mol_type = genomic DNA
gccagttgtcagaagaatcc

SEQ ID NO: 37 - DNA, 20 bp, Homo sapiens
  source 1..20: mol_type = genomic DNA
caactgcattccaaaacagc

SEQ ID NO: 38 - DNA, 21 bp, Homo sapiens
  source 1..21: mol_type = genomic DNA
gaagggaaacagtgagaaaga

SEQ ID NO: 39 - DNA, 20 bp, Homo sapiens
  source 1..20: mol_type = genomic DNA
tcaagcgccgtaagtatgta

SEQ ID NO: 40 - DNA, 20 bp, Homo sapiens
  source 1..20: mol_type = genomic DNA
taaccataacatccagggca

SEQ ID NO: 41 - DNA, 20 bp, Homo sapiens
  source 1..20: mol_type = genomic DNA
ttgtaagctggcacactgaa

SEQ ID NO: 42 - DNA, 20 bp, Homo sapiens
  source 1..20: mol_type = genomic DNA
ttaagaaagtgccgtgttgc

SEQ ID NO: 43 - DNA, 20 bp, Homo sapiens
  source 1..20: mol_type = genomic DNA
atgggtccatgaagagaagc

SEQ ID NO: 44 - DNA, 20 bp, Homo sapiens
  source 1..20: mol_type = genomic DNA
agttgtttccagtactgcca

SEQ ID NO: 45 - DNA, 20 bp, Homo sapiens
  source 1..20: mol_type = genomic DNA
gtatgctttcaagtgacgcc

SEQ ID NO: 46 - DNA, 21 bp, Homo sapiens
  source 1..21: mol_type = genomic DNA
gaagacaatgcaatgaggtgt

SEQ ID NO: 47 - DNA, 20 bp, Homo sapiens
  source 1..20: mol_type = genomic DNA
agacccaatgagaacaggaa

SEQ ID NO: 48 - DNA, 20 bp, Homo sapiens
  source 1..20: mol_type = genomic DNA
tgatggaggaagtgtgaagc

SEQ ID NO: 49 - DNA, 20 bp, Homo sapiens
  source 1..20: mol_type = genomic DNA
tggcttttctgtagtttggg

SEQ ID NO: 50 - DNA, 20 bp, Homo sapiens
  source 1..20: mol_type = genomic DNA
agcagcaagagttgagaaga

SEQ ID NO: 51 - DNA, 21 bp, Homo sapiens
  source 1..21: mol_type = genomic DNA
ggctttgaaaaatcaccatgg

SEQ ID NO: 52 - DNA, 20 bp, Homo sapiens
  source 1..20: mol_type = genomic DNA
agaggtttccatcgttgcta

SEQ ID NO: 53 - DNA, 20 bp, Homo sapiens
  source 1..20: mol_type = genomic DNA
aacagccccaaacttcctac

SEQ ID NO: 54 - DNA, 20 bp, Homo sapiens
  source 1..20: mol_type = genomic DNA
atcactgccaacaagccatt

SEQ ID NO: 55 - DNA, 20 bp, Homo sapiens
  source 1..20: mol_type = genomic DNA
tgagttgtgggggataaagg

SEQ ID NO: 56 - DNA, 20 bp, Homo sapiens
  source 1..20: mol_type = genomic DNA
tctgggcactttccttatga

SEQ ID NO: 57 - DNA, 20 bp, Homo sapiens
  source 1..20: mol_type = genomic DNA
gcagttttgaggggagaaga

SEQ ID NO: 58 - DNA, 19 bp, Homo sapiens
  source 1..19: mol_type = genomic DNA
ttcatgatgccacctcctc

SEQ ID NO: 59 - DNA, 20 bp, Homo sapiens
  source 1..20: mol_type = genomic DNA
gcccaaataccccttcagta

SEQ ID NO: 60 - DNA, 20 bp, Homo sapiens
  source 1..20: mol_type = genomic DNA
gcacctcaatcccgtacaat

SEQ ID NO: 61 - DNA, 20 bp, Homo sapiens
  source 1..20: mol_type = genomic DNA
gcgttttaagcagctgtgta

SEQ ID NO: 62 - DNA, 20 bp, Homo sapiens
  source 1..20: mol_type = genomic DNA
tctccagatcgaaacagcat

SEQ ID NO: 63 - DNA, 20 bp, Homo sapiens
  source 1..20: mol_type = genomic DNA
tcattcaaagccaagatgcc

SEQ ID NO: 64 - DNA, 20 bp, Homo sapiens
  source 1..20: mol_type = genomic DNA
acacgctacatagacactgg

SEQ ID NO: 65 - DNA, 20 bp, Homo sapiens
  source 1..20: mol_type = genomic DNA
caatcgaggtcacattcacc

SEQ ID NO: 66 - DNA, 21 bp, Homo sapiens
  source 1..21: mol_type = genomic DNA
tgacacgctgaagaaaatagc

SEQ ID NO: 67 - DNA, 20 bp, Homo sapiens
  source 1..20: mol_type = genomic DNA
ggagggaatggcagaagtaa

SEQ ID NO: 68 - DNA, 21 bp, Homo sapiens
  source 1..21: mol_type = genomic DNA
ggattttcagagcagaggttg

SEQ ID NO: 69 - DNA, 20 bp, Homo sapiens
  source 1..20: mol_type = genomic DNA
aagagttgcctgtacccttc

SEQ ID NO: 70 - DNA, 19 bp, Homo sapiens
  source 1..19: mol_type = genomic DNA
gtctctttactgggagcgt

SEQ ID NO: 71 - DNA, 20 bp, Homo sapiens
  source 1..20: mol_type = genomic DNA
acattgcccctgacaacata

SEQ ID NO: 72 - DNA, 19 bp, Homo sapiens
  source 1..19: mol_type = genomic DNA
tcattatctgaggagccgg

SEQ ID NO: 73 - DNA, 21 bp, Homo sapiens
  source 1..21: mol_type = genomic DNA
ggctccataatcttctgcaat

SEQ ID NO: 74 - DNA, 20 bp, Homo sapiens
  source 1..20: mol_type = genomic DNA
cgtacatctgatttgtgggt

SEQ ID NO: 75 - DNA, 21 bp, Homo sapiens
  source 1..21: mol_type = genomic DNA
tgccactgatgatacaaaagc

SEQ ID NO: 76 - DNA, 20 bp, Homo sapiens
  source 1..20: mol_type = genomic DNA
gaaacgtgtggtgtcctcta

SEQ ID NO: 77 - DNA, 20 bp, Homo sapiens
  source 1..20: mol_type = genomic DNA
agtgtttggggctctatcag

SEQ ID NO: 78 - DNA, 20 bp, Homo sapiens
  source 1..20: mol_type = genomic DNA
ctttcccttttgagtcctgc

SEQ ID NO: 79 - DNA, 20 bp, Homo sapiens
  source 1..20: mol_type = genomic DNA
tctcgcttaccttgctacat

SEQ ID NO: 80 - DNA, 20 bp, Homo sapiens
  source 1..20: mol_type = genomic DNA
aaagcgggaattggaacttt

SEQ ID NO: 81 - DNA, 20 bp, Homo sapiens
  source 1..20: mol_type = genomic DNA
ggggaacattgggaagagat

SEQ ID NO: 82 - DNA, 20 bp, Homo sapiens
  source 1..20: mol_type = genomic DNA
tctaccagctacaaacccat

SEQ ID NO: 83 - DNA, 20 bp, Homo sapiens
  source 1..20: mol_type = genomic DNA
tcagccaatacccatagcag

SEQ ID NO: 84 - DNA, 20 bp, Homo sapiens
  source 1..20: mol_type = genomic DNA
aatcagaggaagatgggtcg

SEQ ID NO: 85 - DNA, 20 bp, Homo sapiens
  source 1..20: mol_type = genomic DNA
gagaactccaccctgtcttt

SEQ ID NO: 86 - DNA, 20 bp, Homo sapiens
  source 1..20: mol_type = genomic DNA
gggagtgtgtgaatgtgtct

SEQ ID NO: 87 - DNA, 21 bp, Homo sapiens
  source 1..21: mol_type = genomic DNA
aagctttacatcatggcactg

SEQ ID NO: 88 - DNA, 20 bp, Homo sapiens
  source 1..20: mol_type = genomic DNA
aaaggtccataggctcacat

SEQ ID NO: 89 - DNA, 20 bp, Homo sapiens
  source 1..20: mol_type = genomic DNA
ttgaccaatgccattaagcc

SEQ ID NO: 90 - DNA, 21 bp, Homo sapiens
  source 1..21: mol_type = genomic DNA
accagggaaatgttagcttct

SEQ ID NO: 91 - DNA, 21 bp, Homo sapiens
  source 1..21: mol_type = genomic DNA
tgctctgttatggttggagtt

SEQ ID NO: 92 - DNA, 20 bp, Homo sapiens
  source 1..20: mol_type = genomic DNA
gaagcggcagtaattcagga

SEQ ID NO: 93 - DNA, 20 bp, Homo sapiens
  source 1..20: mol_type = genomic DNA
aactgtgtcctaagcagtga

SEQ ID NO: 94 - DNA, 20 bp, Homo sapiens
  source 1..20: mol_type = genomic DNA
gtcacctccagagctttcat

SEQ ID NO: 95 - DNA, 21 bp, Homo sapiens
  source 1..21: mol_type = genomic DNA
gaacaatgcaacctgagaact

SEQ ID NO: 96 - DNA, 21 bp, Homo sapiens
  source 1..21: mol_type = genomic DNA
tgattgtcctctaccatgcat

SEQ ID NO: 97 - DNA, 21 bp, Homo sapiens
  source 1..21: mol_type = genomic DNA
aggcttgaaacaccaccttta

SEQ ID NO: 98 - DNA, 20 bp, Homo sapiens
  source 1..20: mol_type = genomic DNA
ttgatttgttgggtggttgg

SEQ ID NO: 99 - DNA, 20 bp, Homo sapiens
  source 1..20: mol_type = genomic DNA
tgccaatctgaggtttttcc

SEQ ID NO: 100 - DNA, 20 bp, Homo sapiens
  source 1..20: mol_type = genomic DNA
actctgctttagggcttctg

SEQ ID NO: 101 - DNA, 20 bp, Homo sapiens
  source 1..20: mol_type = genomic DNA
gcagaaaagctcccaaacaa

SEQ ID NO: 102 - DNA, 20 bp, Homo sapiens
  source 1..20: mol_type = genomic DNA
gaaaagaggtggagagggag

SEQ ID NO: 103 - DNA, 20 bp, Homo sapiens
  source 1..20: mol_type = genomic DNA
aggacccttttgctgatttc

SEQ ID NO: 104 - DNA, 20 bp, Homo sapiens
  source 1..20: mol_type = genomic DNA
ctggcccaagtgcatacata

SEQ ID NO: 105 - DNA, 20 bp, Homo sapiens
  source 1..20: mol_type = genomic DNA
aaccagagagacaccttgac

SEQ ID NO: 106 - DNA, 20 bp, Homo sapiens
  source 1..20: mol_type = genomic DNA
tcctccctatctcctgtgac

SEQ ID NO: 107 - DNA, 20 bp, Homo sapiens
  source 1..20: mol_type = genomic DNA
actctgccagaaaagcctac

SEQ ID NO: 108 - DNA, 20 bp, Homo sapiens
  source 1..20: mol_type = genomic DNA
cctttgtcttgaagcctcct

SEQ ID NO: 109 - DNA, 20 bp, Homo sapiens
  source 1..20: mol_type = genomic DNA
ttgactgagcagagtagagc

SEQ ID NO: 110 - DNA, 22 bp, Homo sapiens
  source 1..22: mol_type = genomic DNA
ttctacctacaagcaaagagag

SEQ ID NO: 111 - DNA, 21 bp, Homo sapiens
  source 1..21: mol_type = genomic DNA
tcaccaacagaggatcaaact

SEQ ID NO: 112 - DNA, 20 bp, Homo sapiens
  source 1..20: mol_type = genomic DNA
ccgagggataacatacagct

SEQ ID NO: 113 - DNA, 20 bp, Homo sapiens
  source 1..20: mol_type = genomic DNA
cactagtcacagaagcaggt

SEQ ID NO: 114 - DNA, 20 bp, Homo sapiens
  source 1..20: mol_type = genomic DNA
gtagaaaccccgagacaact

SEQ ID NO: 115 - DNA, 20 bp, Homo sapiens
  source 1..20: mol_type = genomic DNA
caatttgctgttcagaggct

SEQ ID NO: 116 - DNA, 20 bp, Homo sapiens
  source 1..20: mol_type = genomic DNA
tcatgatgtggcttagtggg

SEQ ID NO: 117 - DNA, 20 bp, Homo sapiens
  source 1..20: mol_type = genomic DNA
tacacccacatgcatacaca

SEQ ID NO: 118 - DNA, 19 bp, Homo sapiens
  source 1..19: mol_type = genomic DNA
gaagtgtgcatgggagagt

SEQ ID NO: 119 - DNA, 21 bp, Homo sapiens
  source 1..21: mol_type = genomic DNA
tttgggtggctctatgttagg

SEQ ID NO: 120 - DNA, 20 bp, Homo sapiens
  source 1..20: mol_type = genomic DNA
ctccttgactcatttcccgt

SEQ ID NO: 121 - DNA, 20 bp, Homo sapiens
  source 1..20: mol_type = genomic DNA
agagtaccactgccaagaaa

SEQ ID NO: 122 - DNA, 20 bp, Homo sapiens
  source 1..20: mol_type = genomic DNA
ctgctagtctgtcaggagag

SEQ ID NO: 123 - DNA, 20 bp, Homo sapiens
  source 1..20: mol_type = genomic DNA
gggcagcagtataaacatcc

SEQ ID NO: 124 - DNA, 20 bp, Homo sapiens
  source 1..20: mol_type = genomic DNA
gacattcccttccattgagc

SEQ ID NO: 125 - DNA, 20 bp, Homo sapiens
  source 1..20: mol_type = genomic DNA
ttcctggtaaatgtgctggt

SEQ ID NO: 126 - DNA, 20 bp, Homo sapiens
  source 1..20: mol_type = genomic DNA
ggccagatttgcagtgattt

SEQ ID NO: 127 - DNA, 21 bp, Homo sapiens
  source 1..21: mol_type = genomic DNA
agaatcaacaacaatggcagg

SEQ ID NO: 128 - DNA, 21 bp, Homo sapiens
  source 1..21: mol_type = genomic DNA
ctctgaggaaagcttgtagga

SEQ ID NO: 129 - DNA, 20 bp, Homo sapiens
  source 1..20: mol_type = genomic DNA
aggttttcgttctgcttcag

SEQ ID NO: 130 - DNA, 19 bp, Homo sapiens
  source 1..19: mol_type = genomic DNA
cgggtcagtgattctagct

SEQ ID NO: 131 - DNA, 20 bp, Homo sapiens
  source 1..20: mol_type = genomic DNA
gtcactatggaatgggggtt

SEQ ID NO: 132 - DNA, 20 bp, Homo sapiens
  source 1..20: mol_type = genomic DNA
gcttcttccccgcaatatga

SEQ ID NO: 133 - DNA, 20 bp, Homo sapiens
  source 1..20: mol_type = genomic DNA
cggttcagagtcaatgccta

SEQ ID NO: 134 - DNA, 21 bp, Homo sapiens
  source 1..21: mol_type = genomic DNA
tacccaacaagccagagaaat

SEQ ID NO: 135 - DNA, 20 bp, Homo sapiens
  source 1..20: mol_type = genomic DNA
agagggaaagtgcaaggaat

SEQ ID NO: 136 - DNA, 20 bp, Homo sapiens
  source 1..20: mol_type = genomic DNA
gtttttcagcacactgtccc

SEQ ID NO: 137 - DNA, 20 bp, Homo sapiens
  source 1..20: mol_type = genomic DNA
accacattactcacaaccct

SEQ ID NO: 138 - DNA, 20 bp, Homo sapiens
  source 1..20: mol_type = genomic DNA
aagcccttttcatctccaca

SEQ ID NO: 139 - DNA, 20 bp, Homo sapiens
  source 1..20: mol_type = genomic DNA
ccagagctgagacaactact

SEQ ID NO: 140 - DNA, 20 bp, Homo sapiens
  source 1..20: mol_type = genomic DNA
gaagcaattcctcacaccac

SEQ ID NO: 141 - DNA, 20 bp, Homo sapiens
  source 1..20: mol_type = genomic DNA
ttcagtcagaatgaggagcc

SEQ ID NO: 142 - DNA, 20 bp, Homo sapiens
  source 1..20: mol_type = genomic DNA
ctcctctcccctctgatttt

SEQ ID NO: 143 - DNA, 21 bp, Homo sapiens
  source 1..21: mol_type = genomic DNA
ttttaaagcgacagtcacacg

SEQ ID NO: 144 - DNA, 20 bp, Homo sapiens
  source 1..20: mol_type = genomic DNA
tcctctgccttctacccttt

SEQ ID NO: 145 - DNA, 20 bp, Homo sapiens
  source 1..20: mol_type = genomic DNA
tgttgtgccttttgttctgg

SEQ ID NO: 146 - DNA, 22 bp, Homo sapiens
  source 1..22: mol_type = genomic DNA
ttaggaggtaaggctggaaaaa

SEQ ID NO: 147 - DNA, 21 bp, Homo sapiens
  source 1..21: mol_type = genomic DNA
ctgtcagcaatttcaggtcag

SEQ ID NO: 148 - DNA, 20 bp, Homo sapiens
  source 1..20: mol_type = genomic DNA
agacaaaggcttcacggaac

SEQ ID NO: 149 - DNA, 20 bp, Homo sapiens
  source 1..20: mol_type = genomic DNA
ttcctctgtgtcttgaaggt

SEQ ID NO: 150 - DNA, 20 bp, Homo sapiens
  source 1..20: mol_type = genomic DNA
atcaatgcaggtgagtgtga

SEQ ID NO: 151 - DNA, 20 bp, Homo sapiens
  source 1..20: mol_type = genomic DNA
cactccacataagcctcaga

SEQ ID NO: 152 - DNA, 20 bp, Homo sapiens
  source 1..20: mol_type = genomic DNA
aggatgtagttgggtgagga

SEQ ID NO: 153 - DNA, 20 bp, Homo sapiens
  source 1..20: mol_type = genomic DNA
cagtcatcacggggagatac

SEQ ID NO: 154 - DNA, 20 bp, Homo sapiens
  source 1..20: mol_type = genomic DNA
gacagatatttgtgcagggt

SEQ ID NO: 155 - DNA, 20 bp, Homo sapiens
  source 1..20: mol_type = genomic DNA
tcctagcccttacctttcct

SEQ ID NO: 156 - DNA, 20 bp, Homo sapiens
  source 1..20: mol_type = genomic DNA
agcctgaatgtcactgatca

SEQ ID NO: 157 - DNA, 19 bp, Homo sapiens
  source 1..19: mol_type = genomic DNA
actcatcacttctggctgc

SEQ ID NO: 158 - DNA, 20 bp, Homo sapiens
  source 1..20: mol_type = genomic DNA
tcttgtgtttcctgccctat

SEQ ID NO: 159 - DNA, 20 bp, Homo sapiens
  source 1..20: mol_type = genomic DNA
ttgctgtggatgagaatgga

SEQ ID NO: 160 - DNA, 20 bp, Homo sapiens
  source 1..20: mol_type = genomic DNA
tgagggcagaaagaaacaga

SEQ ID NO: 161 - DNA, 20 bp, Homo sapiens
  source 1..20: mol_type = genomic DNA
ggggtcacacatcacttttc

SEQ ID NO: 162 - DNA, 20 bp, Homo sapiens
  source 1..20: mol_type = genomic DNA
atagggtcacaatccactgc

SEQ ID NO: 163 - DNA, 20 bp, Homo sapiens
  source 1..20: mol_type = genomic DNA
atattgagccccgcatgtta

SEQ ID NO: 164 - DNA, 20 bp, Homo sapiens
  source 1..20: mol_type = genomic DNA
ggttgcaggagaaagaacat

SEQ ID NO: 165 - DNA, 20 bp, Homo sapiens
  source 1..20: mol_type = genomic DNA
tgccatgtaattgccaagat

SEQ ID NO: 166 - DNA, 19 bp, Homo sapiens
  source 1..19: mol_type = genomic DNA
cctgttctccatccctctg

SEQ ID NO: 167 - DNA, 21 bp, Homo sapiens
  source 1..21: mol_type = genomic DNA
tcacaaactacccaacaccta

SEQ ID NO: 168 - DNA, 21 bp, Homo sapiens
  source 1..21: mol_type = genomic DNA
cagaattagttggggagctgt

SEQ ID NO: 169 - DNA, 20 bp, Homo sapiens
  source 1..20: mol_type = genomic DNA
gccatctcctgaaatagtgc

SEQ ID NO: 170 - DNA, 20 bp, Homo sapiens
  source 1..20: mol_type = genomic DNA
gcaagtgttcccatctagaa

SEQ ID NO: 171 - DNA, 20 bp, Homo sapiens
  source 1..20: mol_type = genomic DNA
attgatacccctctccccag

SEQ ID NO: 172 - DNA, 19 bp, Homo sapiens
  source 1..19: mol_type = genomic DNA
aagtaagctgtctcctggc

SEQ ID NO: 173 - DNA, 20 bp, Homo sapiens
  source 1..20: mol_type = genomic DNA
aggttggttggcatgaagaa

SEQ ID NO: 174 - DNA, 20 bp, Homo sapiens
  source 1..20: mol_type = genomic DNA
agcagagtttcaagacaagc

SEQ ID NO: 175 - DNA, 20 bp, Homo sapiens
  source 1..20: mol_type = genomic DNA
ttttacacagcaggcctctt

SEQ ID NO: 176 - DNA, 21 bp, Homo sapiens
  source 1..21: mol_type = genomic DNA
gcaactccaaattatcagggc

SEQ ID NO: 177 - DNA, 20 bp, Homo sapiens
  source 1..20: mol_type = genomic DNA
cagcaccttcccttagcaaa

SEQ ID NO: 178 - DNA, 20 bp, Homo sapiens
  source 1..20: mol_type = genomic DNA
cttgttgtcttgtagccctg

SEQ ID NO: 179 - DNA, 20 bp, Homo sapiens
  source 1..20: mol_type = genomic DNA
cacagatacagacgtccaca

SEQ ID NO: 180 - DNA, 21 bp, Homo sapiens
  source 1..21: mol_type = genomic DNA
agctcagcaattaaacagtcc

SEQ ID NO: 181 - DNA, 20 bp, Homo sapiens
  source 1..20: mol_type = genomic DNA
tgttgagagtgccagagatg

SEQ ID NO: 182 - DNA, 20 bp, Homo sapiens
  source 1..20: mol_type = genomic DNA
cttccaccttctgccaatga

SEQ ID NO: 183 - DNA, 20 bp, Homo sapiens
  source 1..20: mol_type = genomic DNA
ttctgacatttgcaagcacc

SEQ ID NO: 184 - DNA, 20 bp, Homo sapiens
  source 1..20: mol_type = genomic DNA
ctgttgctagtttcttgggc

SEQ ID NO: 185 - DNA, 19 bp, Homo sapiens
  source 1..19: mol_type = genomic DNA
ttttccagtcccagcacat

SEQ ID NO: 186 - DNA, 21 bp, Homo sapiens
  source 1..21: mol_type = genomic DNA
tctctctcttcctgaaacagc

SEQ ID NO: 187 - DNA, 21 bp, Homo sapiens
  source 1..21: mol_type = genomic DNA
aacctctgctttgtgtagtga

SEQ ID NO: 188 - DNA, 20 bp, Homo sapiens
  source 1..20: mol_type = genomic DNA
gagagaatgcaaggttcagc

SEQ ID NO: 189 - DNA, 20 bp, Homo sapiens
  source 1..20: mol_type = genomic DNA
tacagcatcaaagaggaagc

SEQ ID NO: 190 - DNA, 20 bp, Homo sapiens
  source 1..20: mol_type = genomic DNA
gaggggatgaggggaaaaag

SEQ ID NO: 191 - DNA, 20 bp, Homo sapiens
  source 1..20: mol_type = genomic DNA
catgacctctgacggatctg

SEQ ID NO: 192 - DNA, 19 bp, Homo sapiens
  source 1..19: mol_type = genomic DNA
aggcaatgaggtcaaggac

SEQ ID NO: 193 - DNA, 20 bp, Homo sapiens
  source 1..20: mol_type = genomic DNA
atgatggccccaacttcttc

SEQ ID NO: 194 - DNA, 20 bp, Homo sapiens
  source 1..20: mol_type = genomic DNA
ttctagacactgagggagca

SEQ ID NO: 195 - DNA, 20 bp, Homo sapiens
  source 1..20: mol_type = genomic DNA
aacgctacactttacgagct

SEQ ID NO: 196 - DNA, 20 bp, Homo sapiens
  source 1..20: mol_type = genomic DNA
tcaacactacctgccaatca

SEQ ID NO: 197 - DNA, 19 bp, Homo sapiens
  source 1..19: mol_type = genomic DNA
tgccgacacaaaagaatgc

SEQ ID NO: 198 - DNA, 19 bp, Homo sapiens
  source 1..19: mol_type = genomic DNA
aaagtgttcctccctgctg

SEQ ID NO: 199 - DNA, 20 bp, Homo sapiens
  source 1..20: mol_type = genomic DNA
aggagcaaaatagtctggct

SEQ ID NO: 200 - DNA, 21 bp, Homo sapiens
  source 1..21: mol_type = genomic DNA
accactcttgaatcattgcag

SEQ ID NO: 201 - DNA, 21 bp, Homo sapiens
  source 1..21: mol_type = genomic DNA
ccagccaattttctctttccc

SEQ ID NO: 202 - DNA, 20 bp, Homo sapiens
  source 1..20: mol_type = genomic DNA
actgtccctactgccaattt

SEQ ID NO: 203 - DNA, 21 bp, Homo sapiens
  source 1..21: mol_type = genomic DNA
atctggtttgaacttgccaac

SEQ ID NO: 204 - DNA, 20 bp, Homo sapiens
  source 1..20: mol_type = genomic DNA
cactctgaatagctctcccc

SEQ ID NO: 205 - DNA, 20 bp, Homo sapiens
  source 1..20: mol_type = genomic DNA
ttatccgggacagtttcagg

SEQ ID NO: 206 - DNA, 20 bp, Homo sapiens
  source 1..20: mol_type = genomic DNA
gaatcttttggcccacactg

SEQ ID NO: 207 - DNA, 20 bp, Homo sapiens
  source 1..20: mol_type = genomic DNA
gtcagacacacttagctggt

SEQ ID NO: 208 - DNA, 20 bp, Homo sapiens
  source 1..20: mol_type = genomic DNA
acacatttcaccttcaccct

SEQ ID NO: 209 - DNA, 20 bp, Homo sapiens
  source 1..20: mol_type = genomic DNA
gcactaatccaggggcttaa

SEQ ID NO: 210 - DNA, 20 bp, Homo sapiens
  source 1..20: mol_type = genomic DNA
ccccttaccaccacttctac

SEQ ID NO: 211 - DNA, 20 bp, Homo sapiens
  source 1..20: mol_type = genomic DNA
ttcagatcccttaagcacgc

SEQ ID NO: 212 - DNA, 20 bp, Homo sapiens
  source 1..20: mol_type = genomic DNA
acctaaggcctcaaattcca

SEQ ID NO: 213 - DNA, 20 bp, Homo sapiens
  source 1..20: mol_type = genomic DNA
cagaccacgggcataagaaa

SEQ ID NO: 214 - DNA, 20 bp, Homo sapiens
  source 1..20: mol_type = genomic DNA
tggatgtgtggatttggaga

SEQ ID NO: 215 - DNA, 19 bp, Homo sapiens
  source 1..19: mol_type = genomic DNA
ctggctgtcttctgggaaa

SEQ ID NO: 216 - DNA, 21 bp, Homo sapiens
  source 1..21: mol_type = genomic DNA
caagcagaactgagaagagtc

SEQ ID NO: 217 - DNA, 20 bp, Homo sapiens
  source 1..20: mol_type = genomic DNA
agtggaacgaggattgtgtt

SEQ ID NO: 218 - DNA, 20 bp, Homo sapiens
  source 1..20: mol_type = genomic DNA
ctcccatctgaaactgctga

SEQ ID NO: 219 - DNA, 19 bp, Homo sapiens
  source 1..19: mol_type = genomic DNA
acatcacaaccaccctgac

SEQ ID NO: 220 - DNA, 20 bp, Homo sapiens
  source 1..20: mol_type = genomic DNA
gtgttgacctgatttgccaa

SEQ ID NO: 221 - DNA, 20 bp, Homo sapiens
  source 1..20: mol_type = genomic DNA
gaacaaagaggaacagagcc

SEQ ID NO: 222 - DNA, 20 bp, Homo sapiens
  source 1..20: mol_type = genomic DNA
ttcatgattccagggtcctc

SEQ ID NO: 223 - DNA, 22 bp, Homo sapiens
  source 1..22: mol_type = genomic DNA
ggacggatttagtgtacattgg

SEQ ID NO: 224 - DNA, 20 bp, Homo sapiens
  source 1..20: mol_type = genomic DNA
tttccttccaacaccacaga

SEQ ID NO: 225 - DNA, 20 bp, Homo sapiens
  source 1..20: mol_type = genomic DNA
tccttagggttctgcgaaat

SEQ ID NO: 226 - DNA, 20 bp, Homo sapiens
  source 1..20: mol_type = genomic DNA
ggaaactccctgccttctac

SEQ ID NO: 227 - DNA, 20 bp, Homo sapiens
  source 1..20: mol_type = genomic DNA
tcttccaaacaccaggtcta

SEQ ID NO: 228 - DNA, 19 bp, Homo sapiens
  source 1..19: mol_type = genomic DNA
actcaatggaaggaagggc

SEQ ID NO: 229 - DNA, 20 bp, Homo sapiens
  source 1..20: mol_type = genomic DNA
aaggacttgtgctgtattgc

SEQ ID NO: 230 - DNA, 20 bp, Homo sapiens
  source 1..20: mol_type = genomic DNA
gacgggagccagtattctac

SEQ ID NO: 231 - DNA, 20 bp, Homo sapiens
  source 1..20: mol_type = genomic DNA
gggattgagagcttggttct

SEQ ID NO: 232 - DNA, 20 bp, Homo sapiens
  source 1..20: mol_type = genomic DNA
ctccccaccaagatgttcaa

SEQ ID NO: 233 - DNA, 20 bp, Homo sapiens
  source 1..20: mol_type = genomic DNA
gttttgggtcatgcagtgtt

SEQ ID NO: 234 - DNA, 20 bp, Homo sapiens
  source 1..20: mol_type = genomic DNA
gacaaaaacacttgccagac

SEQ ID NO: 235 - DNA, 20 bp, Homo sapiens
  source 1..20: mol_type = genomic DNA
aaccatggctttgcaagtac

SEQ ID NO: 236 - DNA, 20 bp, Homo sapiens
  source 1..20: mol_type = genomic DNA
ggaaccctctgctattttgc

SEQ ID NO: 237 - DNA, 20 bp, Homo sapiens
  source 1..20: mol_type = genomic DNA
tactccttgtgtgaacccct

SEQ ID NO: 238 - DNA, 20 bp, Homo sapiens
  source 1..20: mol_type = genomic DNA
acctttaccccataccatcc

SEQ ID NO: 239 - DNA, 20 bp, Homo sapiens
  source 1..20: mol_type = genomic DNA
cattcctttggttggtgtcc

SEQ ID NO: 240 - DNA, 20 bp, Homo sapiens
  source 1..20: mol_type = genomic DNA
ctaatgggcctgttgttcct

SEQ ID NO: 241 - DNA, 20 bp, Homo sapiens
  source 1..20: mol_type = genomic DNA
caacctacctgcccatagtt

SEQ ID NO: 242 - DNA, 20 bp, Homo sapiens
  source 1..20: mol_type = genomic DNA
cgtagcaaattatggcgagg

SEQ ID NO: 243 - DNA, 20 bp, Homo sapiens
  source 1..20: mol_type = genomic DNA
ggtcagaagggaaagggttc

SEQ ID NO: 244 - DNA, 20 bp, Homo sapiens
  source 1..20: mol_type = genomic DNA
ccagattaaaacgtggtgcc

SEQ ID NO: 245 - DNA, 20 bp, Homo sapiens
  source 1..20: mol_type = genomic DNA
cccacaactataggtcgcat

SEQ ID NO: 246 - DNA, 21 bp, Homo sapiens
  source 1..21: mol_type = genomic DNA
agttgttccatttgtaccagc

SEQ ID NO: 247 - DNA, 19 bp, Homo sapiens
  source 1..19: mol_type = genomic DNA
ttggctgcactttgagtca

SEQ ID NO: 248 - DNA, 20 bp, Homo sapiens
  source 1..20: mol_type = genomic DNA
cagatggcccattgtaacaa

SEQ ID NO: 249 - DNA, 19 bp, Homo sapiens
  source 1..19: mol_type = genomic DNA
tattgaggttcccgtgctg

SEQ ID NO: 250 - DNA, 20 bp, Homo sapiens
  source 1..20: mol_type = genomic DNA
agaatgtgaagtggctccat

SEQ ID NO: 251 - DNA, 20 bp, Homo sapiens
  source 1..20: mol_type = genomic DNA
tttgggtttgtgtgtgtgtg

SEQ ID NO: 252 - DNA, 20 bp, Homo sapiens
  source 1..20: mol_type = genomic DNA
aggaatctctctctgccaag

SEQ ID NO: 253 - DNA, 20 bp, Homo sapiens
  source 1..20: mol_type = genomic DNA
tcttcaaggcaggtcatagg

SEQ ID NO: 254 - DNA, 21 bp, Homo sapiens
  source 1..21: mol_type = genomic DNA
gaaacctaagacgttccactg

SEQ ID NO: 255 - DNA, 20 bp, Homo sapiens
  source 1..20: mol_type = genomic DNA
gagtgaagggattggagcaa

SEQ ID NO: 256 - DNA, 20 bp, Homo sapiens
  source 1..20: mol_type = genomic DNA
atgtctcaggctaggtgttc

SEQ ID NO: 257 - DNA, 20 bp, Homo sapiens
  source 1..20: mol_type = genomic DNA
acactcacaaagcccagtta

SEQ ID NO: 258 - DNA, 20 bp, Homo sapiens
  source 1..20: mol_type = genomic DNA
gtgcagactcatgttatggc

SEQ ID NO: 259 - DNA, 20 bp, Homo sapiens
  source 1..20: mol_type = genomic DNA
aggatctcaaagcaccacag

SEQ ID NO: 260 - DNA, 20 bp, Homo sapiens
  source 1..20: mol_type = genomic DNA
aacgggaagagggaaacttt

SEQ ID NO: 261 - DNA, 20 bp, Homo sapiens
  source 1..20: mol_type = genomic DNA
atgttcaacagagtcaggct

SEQ ID NO: 262 - DNA, 20 bp, Homo sapiens
  source 1..20: mol_type = genomic DNA
cagtaacagtccagggtctt

SEQ ID NO: 263 - DNA, 20 bp, Homo sapiens
  source 1..20: mol_type = genomic DNA
agtctgggagcctagaatca

SEQ ID NO: 264 - DNA, 22 bp, Homo sapiens
  source 1..22: mol_type = genomic DNA
cattgtagtttcaggacaccaa

SEQ ID NO: 265 - DNA, 20 bp, Homo sapiens
  source 1..20: mol_type = genomic DNA
accacagaatgacttgcagc

SEQ ID NO: 266 - DNA, 20 bp, Homo sapiens
  source 1..20: mol_type = genomic DNA
tttcacgtgtaacaggagca

SEQ ID NO: 267 - DNA, 20 bp, Homo sapiens
  source 1..20: mol_type = genomic DNA
tgctacagggaaaatggtct

SEQ ID NO: 268 - DNA, 20 bp, Homo sapiens
  source 1..20: mol_type = genomic DNA
tccactgcttagtttgcctt

SEQ ID NO: 269 - DNA, 20 bp, Homo sapiens
  source 1..20: mol_type = genomic DNA
acaggtggggagaaaaggta

SEQ ID NO: 270 - DNA, 20 bp, Homo sapiens
  source 1..20: mol_type = genomic DNA
ctgccactactacacagcta

SEQ ID NO: 271 - DNA, 20 bp, Homo sapiens
  source 1..20: mol_type = genomic DNA
atgggtctctggaatgcatg

SEQ ID NO: 272 - DNA, 20 bp, Homo sapiens
  source 1..20: mol_type = genomic DNA
agttctccacagcacatcat

SEQ ID NO: 273 - DNA, 20 bp, Homo sapiens
  source 1..20: mol_type = genomic DNA
tctttcatctcagctctgca

SEQ ID NO: 274 - DNA, 20 bp, Homo sapiens
  source 1..20: mol_type = genomic DNA
ccgaacagtattttgagggg

SEQ ID NO: 275 - DNA, 20 bp, Homo sapiens
  source 1..20: mol_type = genomic DNA
tttggctgtttcctgtttcc

SEQ ID NO: 276 - DNA, 20 bp, Homo sapiens
  source 1..20: mol_type = genomic DNA
acctaacttgccttgtcctt

SEQ ID NO: 277 - DNA, 20 bp, Homo sapiens
  source 1..20: mol_type = genomic DNA
acaggagaacaagcagcata

SEQ ID NO: 278 - DNA, 21 bp, Homo sapiens
  source 1..21: mol_type = genomic DNA
cagcctagtatatgggaacgt

SEQ ID NO: 279 - DNA, 23 bp, Homo sapiens
  source 1..23: mol_type = genomic DNA
acccatatgtagtatcgctcttg

SEQ ID NO: 280 - DNA, 21 bp, Homo sapiens
  source 1..21: mol_type = genomic DNA
tatgggtttttctgctccact

SEQ ID NO: 281 - DNA, 20 bp, Homo sapiens
  source 1..20: mol_type = genomic DNA
aaatgtgagggagagtcgtc

SEQ ID NO: 282 - DNA, 19 bp, Homo sapiens
  source 1..19: mol_type = genomic DNA
gcaggacccttcagcatta

SEQ ID NO: 283 - DNA, 20 bp, Homo sapiens
  source 1..20: mol_type = genomic DNA
gactggatgatgcaaaggtg

SEQ ID NO: 284 - DNA, 20 bp, Homo sapiens
  source 1..20: mol_type = genomic DNA
aacatttgcagggggatcaa

SEQ ID NO: 285 - DNA, 20 bp, Homo sapiens
  source 1..20: mol_type = genomic DNA
aaagatgcctccttgtgtct

SEQ ID NO: 286 - DNA, 20 bp, Homo sapiens
  source 1..20: mol_type = genomic DNA
aagttatctgcccagggaaa

SEQ ID NO: 287 - DNA, 20 bp, Homo sapiens
  source 1..20: mol_type = genomic DNA
tcctggctagttttgctgaa

SEQ ID NO: 288 - DNA, 20 bp, Homo sapiens
  source 1..20: mol_type = genomic DNA
ctccttgcttgcctttacac

SEQ ID NO: 289 - DNA, 20 bp, Homo sapiens
  source 1..20: mol_type = genomic DNA
agccttaattccccatgcat

SEQ ID NO: 290 - DNA, 20 bp, Homo sapiens
  source 1..20: mol_type = genomic DNA
tttttctgtggagtgtggct

SEQ ID NO: 291 - DNA, 20 bp, Homo sapiens
  source 1..20: mol_type = genomic DNA
aaagagtcaaccatgcactg

SEQ ID NO: 292 - DNA, 20 bp, Homo sapiens
  source 1..20: mol_type = genomic DNA
ggtgaagcagcctgaataaa

SEQ ID NO: 293 - DNA, 19 bp, Homo sapiens
  source 1..19: mol_type = genomic DNA
tctttgtaccaagctgcca

SEQ ID NO: 294 - DNA, 20 bp, Homo sapiens
  source 1..20: mol_type = genomic DNA
gcttctactttcccctccag

SEQ ID NO: 295 - DNA, 20 bp, Homo sapiens
  source 1..20: mol_type = genomic DNA
agaaaagccaacctcctctt

SEQ ID NO: 296 - DNA, 20 bp, Homo sapiens
  source 1..20: mol_type = genomic DNA
ccagggtactaaaaggggac

SEQ ID NO: 297 - DNA, 20 bp, Homo sapiens
  source 1..20: mol_type = genomic DNA
ttgtgggtcaatgtcaacac

SEQ ID NO: 298 - DNA, 20 bp, Homo sapiens
  source 1..20: mol_type = genomic DNA
agaaaaggtggaggaaggga

SEQ ID NO: 299 - DNA, 21 bp, Homo sapiens
  source 1..21: mol_type = genomic DNA
ggagttgtttacaggtggact

SEQ ID NO: 300 - DNA, 21 bp, Homo sapiens
  source 1..21: mol_type = genomic DNA
tagcttccaattcacaggtca

SEQ ID NO: 301 - DNA, 20 bp, Homo sapiens
  source 1..20: mol_type = genomic DNA
ttaaatgcgccaagtcccta

SEQ ID NO: 302 - DNA, 20 bp, Homo sapiens
  source 1..20: mol_type = genomic DNA
atttcctgggtcaagctctt

SEQ ID NO: 303 - DNA, 20 bp, Homo sapiens
  source 1..20: mol_type = genomic DNA
cttggaccaggaatgctcta

SEQ ID NO: 304 - DNA, 20 bp, Homo sapiens
  source 1..20: mol_type = genomic DNA
aggcagtcagatccacctat

SEQ ID NO: 305 - DNA, 20 bp, Homo sapiens
  source 1..20: mol_type = genomic DNA
aaaattgcctgctgtttgga

SEQ ID NO: 306 - DNA, 20 bp, Homo sapiens
  source 1..20: mol_type = genomic DNA
gcaccatcatgaaacctcct

SEQ ID NO: 307 - DNA, 20 bp, Homo sapiens
  source 1..20: mol_type = genomic DNA
ataggccagtctcaggtaga

SEQ ID NO: 308 - DNA, 20 bp, Homo sapiens
  source 1..20: mol_type = genomic DNA
agattgcagcctacccaaag

SEQ ID NO: 309 - DNA, 20 bp, Homo sapiens
  source 1..20: mol_type = genomic DNA
ttgactgaagtgttccaggt

SEQ ID NO: 310 - DNA, 20 bp, Homo sapiens
  source 1..20: mol_type = genomic DNA
gcttctttcaaccatccacc

SEQ ID NO: 311 - DNA, 20 bp, Homo sapiens
  source 1..20: mol_type = genomic DNA
gcagcactcaactattccac

SEQ ID NO: 312 - DNA, 20 bp, Homo sapiens
  source 1..20: mol_type = genomic DNA
caggagttatggcaccagtg

SEQ ID NO: 313 - DNA, 20 bp, Homo sapiens
  source 1..20: mol_type = genomic DNA
gagagtgtggaggcagaaaa

SEQ ID NO: 314 - DNA, 20 bp, Homo sapiens
  source 1..20: mol_type = genomic DNA
gcccaacttattttccagct

SEQ ID NO: 315 - DNA, 21 bp, Homo sapiens
  source 1..21: mol_type = genomic DNA
tcaagccccttagattgaaca

SEQ ID NO: 316 - DNA, 20 bp, Homo sapiens
  source 1..20: mol_type = genomic DNA
gctgggcatgtagaactcaa

SEQ ID NO: 317 - DNA, 20 bp, Homo sapiens
  source 1..20: mol_type = genomic DNA
gggaaattgtcaagggcttt

SEQ ID NO: 318 - DNA, 21 bp, Homo sapiens
  source 1..21: mol_type = genomic DNA
cttagttgctgttgtgcttct

SEQ ID NO: 319 - DNA, 20 bp, Homo sapiens
  source 1..20: mol_type = genomic DNA
agttgtagctgtatctgggt

SEQ ID NO: 320 - DNA, 20 bp, Homo sapiens
  source 1..20: mol_type = genomic DNA
agctgagtcatgtttaaggc

SEQ ID NO: 321 - DNA, 21 bp, Homo sapiens
  source 1..21: mol_type = genomic DNA
caattcagactttgcccaaac

SEQ ID NO: 322 - DNA, 21 bp, Homo sapiens
  source 1..21: mol_type = genomic DNA
caatcattcccacagttccaa

SEQ ID NO: 323 - DNA, 20 bp, Homo sapiens
  source 1..20: mol_type = genomic DNA
ctgtgatggtccattcaagg

SEQ ID NO: 324 - DNA, 20 bp, Homo sapiens
  source 1..20: mol_type = genomic DNA
tagctggaaattgcaaggag

SEQ ID NO: 325 - DNA, 19 bp, Homo sapiens
  source 1..19: mol_type = genomic DNA
tctgttcacctgagccttt

SEQ ID NO: 326 - DNA, 20 bp, Homo sapiens
  source 1..20: mol_type = genomic DNA
taacttggactgtgaaccca

SEQ ID NO: 327 - DNA, 20 bp, Homo sapiens
  source 1..20: mol_type = genomic DNA
cgcaacaggatgaaggaaat

SEQ ID NO: 328 - DNA, 20 bp, Homo sapiens
  source 1..20: mol_type = genomic DNA
gactcacactctgaaagcct

SEQ ID NO: 329 - DNA, 21 bp, Homo sapiens
  source 1..21: mol_type = genomic DNA
aatttaggtagcactgacccc

SEQ ID NO: 330 - DNA, 20 bp, Homo sapiens
  source 1..20: mol_type = genomic DNA
ctggggaattaggaagcaga

SEQ ID NO: 331 - DNA, 19 bp, Homo sapiens
  source 1..19: mol_type = genomic DNA
atgacaaggctggctcatc

SEQ ID NO: 332 - DNA, 20 bp, Homo sapiens
  source 1..20: mol_type = genomic DNA
ttagttttggcatgtggtgg

SEQ ID NO: 333 - DNA, 20 bp, Homo sapiens
  source 1..20: mol_type = genomic DNA
tggtgagggagtgttctttt

SEQ ID NO: 334 - DNA, 20 bp, Homo sapiens
  source 1..20: mol_type = genomic DNA
tcattgggggagtcattcac

SEQ ID NO: 335 - DNA, 20 bp, Homo sapiens
  source 1..20: mol_type = genomic DNA
gaagtggtgtgatgagggtg

SEQ ID NO: 336 - DNA, 20 bp, Homo sapiens
  source 1..20: mol_type = genomic DNA
aagttaggccctgttaagca

SEQ ID NO: 337 - DNA, 20 bp, Homo sapiens
  source 1..20: mol_type = genomic DNA
tgttggtcggagtcagaaat

SEQ ID NO: 338 - DNA, 20 bp, Homo sapiens
  source 1..20: mol_type = genomic DNA
gtaaaagaggttgggatgcc

SEQ ID NO: 339 - DNA, 20 bp, Homo sapiens
  source 1..20: mol_type = genomic DNA
cgttggacatggatcatacc

SEQ ID NO: 340 - DNA, 22 bp, Homo sapiens
  source 1..22: mol_type = genomic DNA
tcacaacaagggaaatagccta

SEQ ID NO: 341 - DNA, 20 bp, Homo sapiens
  source 1..20: mol_type = genomic DNA
tagtcaggtaaacaacgcct

SEQ ID NO: 342 - DNA, 21 bp, Homo sapiens
  source 1..21: mol_type = genomic DNA
tctgtttcttgtttggctgag

SEQ ID NO: 343 - DNA, 20 bp, Homo sapiens
  source 1..20: mol_type = genomic DNA
acataggtcacacaaagggt

SEQ ID NO: 344 - DNA, 20 bp, Homo sapiens
  source 1..20: mol_type = genomic DNA
gtgtgacacttttctgcctt

SEQ ID NO: 345 - DNA, 21 bp, Homo sapiens
  source 1..21: mol_type = genomic DNA
ctggaaatagaaggcctttgc

SEQ ID NO: 346 - DNA, 20 bp, Homo sapiens
  source 1..20: mol_type = genomic DNA
tcttggtctgggaataagcc

SEQ ID NO: 347 - DNA, 20 bp, Homo sapiens
  source 1..20: mol_type = genomic DNA
tgcccctatgaacaacagaa

SEQ ID NO: 348 - DNA, 20 bp, Homo sapiens
  source 1..20: mol_type = genomic DNA
tgaacgtcttgcttacccac

SEQ ID NO: 349 - DNA, 19 bp, Homo sapiens
  source 1..19: mol_type = genomic DNA
gaaggaaggcagaggtcaa

SEQ ID NO: 350 - DNA, 20 bp, Homo sapiens
  source 1..20: mol_type = genomic DNA
cttccacaaagtcctgcaac

SEQ ID NO: 351 - DNA, 20 bp, Homo sapiens
  source 1..20: mol_type = genomic DNA
atgtgaaccattgagaggca

SEQ ID NO: 352 - DNA, 20 bp, Homo sapiens
  source 1..20: mol_type = genomic DNA
aagagaaactaccctggcaa

SEQ ID NO: 353 - DNA, 20 bp, Homo sapiens
  source 1..20: mol_type = genomic DNA
gcatgtagttcagttcaggc

SEQ ID NO: 354 - DNA, 20 bp, Homo sapiens
  source 1..20: mol_type = genomic DNA
atgaaatgtaatggggtgcg

SEQ ID NO: 355 - DNA, 20 bp, Homo sapiens
  source 1..20: mol_type = genomic DNA
ttttggcagtgatgaccttg

SEQ ID NO: 356 - DNA, 20 bp, Homo sapiens
  source 1..20: mol_type = genomic DNA
ttcttggcttttctgaccct

SEQ ID NO: 357 - DNA, 21 bp, Homo sapiens
  source 1..21: mol_type = genomic DNA
ttgagaaagaccccaacagaa

SEQ ID NO: 358 - DNA, 22 bp, Homo sapiens
  source 1..22: mol_type = genomic DNA
gaaaataacacagtagggatgc

SEQ ID NO: 359 - DNA, 20 bp, Homo sapiens
  source 1..20: mol_type = genomic DNA
gaatggagaggcagttttca

SEQ ID NO: 360 - DNA, 20 bp, Homo sapiens
  source 1..20: mol_type = genomic DNA
cacccttttcctgttttgca

SEQ ID NO: 361 - DNA, 21 bp, Homo sapiens
  source 1..21: mol_type = genomic DNA
agaagaaacttgcagtgttgg

SEQ ID NO: 362 - DNA, 21 bp, Homo sapiens
  source 1..21: mol_type = genomic DNA
tgcagcattattctttctggg

SEQ ID NO: 363 - DNA, 21 bp, Homo sapiens
  source 1..21: mol_type = genomic DNA
acacacatattagggaacagc

SEQ ID NO: 364 - DNA, 20 bp, Homo sapiens
  source 1..20: mol_type = genomic DNA
gagtgtaggtgcttgggtat

SEQ ID NO: 365 - DNA, 20 bp, Homo sapiens
  source 1..20: mol_type = genomic DNA
ccttagaatcctagcgcctt

SEQ ID NO: 366 - DNA, 20 bp, Homo sapiens
  source 1..20: mol_type = genomic DNA
tcatgaggttgccagtgttt

SEQ ID NO: 367 - DNA, 20 bp, Homo sapiens
  source 1..20: mol_type = genomic DNA
ccccatacatcatcacatgc

SEQ ID NO: 368 - DNA, 20 bp, Homo sapiens
  source 1..20: mol_type = genomic DNA
gggtaatgctttcttgggga

SEQ ID NO: 369 - DNA, 20 bp, Homo sapiens
  source 1..20: mol_type = genomic DNA
agttgagaagggaaggcaag

SEQ ID NO: 370 - DNA, 21 bp, Homo sapiens
  source 1..21: mol_type = genomic DNA
ctcctggtggcttatttttga

SEQ ID NO: 371 - DNA, 22 bp, Homo sapiens
  source 1..22: mol_type = genomic DNA
tctggattttggctactcatga

SEQ ID NO: 372 - DNA, 20 bp, Homo sapiens
  source 1..20: mol_type = genomic DNA
gtagtcctcctttgcccttc

SEQ ID NO: 373 - DNA, 20 bp, Homo sapiens
  source 1..20: mol_type = genomic DNA
gacatgcacagatcgaaacc

SEQ ID NO: 374 - DNA, 20 bp, Homo sapiens
  source 1..20: mol_type = genomic DNA
cgcatttgacaacagggatc

SEQ ID NO: 375 - DNA, 20 bp, Homo sapiens
  source 1..20: mol_type = genomic DNA
aagccacctgttctctctca

SEQ ID NO: 376 - DNA, 20 bp, Homo sapiens
  source 1..20: mol_type = genomic DNA
attccaaccattccgacacc

SEQ ID NO: 377 - DNA, 20 bp, Homo sapiens
  source 1..20: mol_type = genomic DNA
aaagaaaatggtgaacgtgc

SEQ ID NO: 378 - DNA, 20 bp, Homo sapiens
  source 1..20: mol_type = genomic DNA
tgatcagggctttagaggtc

SEQ ID NO: 379 - DNA, 20 bp, Homo sapiens
  source 1..20: mol_type = genomic DNA
actccctattgttctcccct

SEQ ID NO: 380 - DNA, 20 bp, Homo sapiens
  source 1..20: mol_type = genomic DNA
ctccttgacagatgtgaccc

SEQ ID NO: 381 - DNA, 20 bp, Homo sapiens
  source 1..20: mol_type = genomic DNA
ttttggagtctgagccacaa

SEQ ID NO: 382 - DNA, 19 bp, Homo sapiens
  source 1..19: mol_type = genomic DNA
ttgaagtcccgttgctgat

SEQ ID NO: 383 - DNA, 20 bp, Homo sapiens
  source 1..20: mol_type = genomic DNA
ttggggtcagttctaacagt

SEQ ID NO: 384 - DNA, 20 bp, Homo sapiens
  source 1..20: mol_type = genomic DNA
ttttcaccacctcttccctc

SEQ ID NO: 385 - DNA, 20 bp, Homo sapiens
  source 1..20: mol_type = genomic DNA
acctgaccacaagctttaca

SEQ ID NO: 386 - DNA, 20 bp, Homo sapiens
  source 1..20: mol_type = genomic DNA
cacatattggcgcacagtac

SEQ ID NO: 387 - DNA, 20 bp, Homo sapiens
  source 1..20: mol_type = genomic DNA
gccatgcaccgatgaaaaat

SEQ ID NO: 388 - DNA, 20 bp, Homo sapiens
  source 1..20: mol_type = genomic DNA
ttgtgaggagatttctgggc

SEQ ID NO: 389 - DNA, 20 bp, Homo sapiens
  source 1..20: mol_type = genomic DNA
cacactaagagcactgggaa

SEQ ID NO: 390 - DNA, 20 bp, Homo sapiens
  source 1..20: mol_type = genomic DNA
atgacctagcacatcttccc

SEQ ID NO: 391 - DNA, 20 bp, Homo sapiens
  source 1..20: mol_type = genomic DNA
acattttccccattccatgc

SEQ ID NO: 392 - DNA, 20 bp, Homo sapiens
  source 1..20: mol_type = genomic DNA
gtctgtcaaccacactttgc

SEQ ID NO: 393 - DNA, 20 bp, Homo sapiens
  source 1..20: mol_type = genomic DNA
ctgtctctccttttgccaaa

SEQ ID NO: 394 - DNA, 20 bp, Homo sapiens
  source 1..20: mol_type = genomic DNA
agtaacctgcgactctcagt

SEQ ID NO: 395 - DNA, 20 bp, Homo sapiens
  source 1..20: mol_type = genomic DNA
tagcatttaaggagtgggct

SEQ ID NO: 396 - DNA, 20 bp, Homo sapiens
  source 1..20: mol_type = genomic DNA
ggcctcctcagtgatttgaa

SEQ ID NO: 397 - DNA, 20 bp, Homo sapiens
  source 1..20: mol_type = genomic DNA
ctttctttgcctcccctgta

SEQ ID NO: 398 - DNA, 20 bp, Homo sapiens
  source 1..20: mol_type = genomic DNA
acttccatttgtgtcaacgg

SEQ ID NO: 399 - DNA, 20 bp, Homo sapiens
  source 1..20: mol_type = genomic DNA
tcttgctttgggttagaggg

SEQ ID NO: 400 - DNA, 20 bp, Homo sapiens
  source 1..20: mol_type = genomic DNA
aaccacacctccacaagaaa

SEQ ID NO: 401 - DNA, 20 bp, Homo sapiens
  source 1..20: mol_type = genomic DNA
caagatatgagggaggggaa

SEQ ID NO: 402 - DNA, 20 bp, Homo sapiens
  source 1..20: mol_type = genomic DNA
tctaacctgggccctttctt

SEQ ID NO: 403 - DNA, 20 bp, Homo sapiens
  source 1..20: mol_type = genomic DNA
tgcccttccagaactgtaaa

SEQ ID NO: 404 - DNA, 20 bp, Homo sapiens
  source 1..20: mol_type = genomic DNA
gccaggtcacttaacaaagc

SEQ ID NO: 405 - DNA, 19 bp, Homo sapiens
  source 1..19: mol_type = genomic DNA
caataaggcgccaagttcg

SEQ ID NO: 406 - DNA, 20 bp, Homo sapiens
  source 1..20: mol_type = genomic DNA
gtcatcaggggagcaaatgt

SEQ ID NO: 407 - DNA, 21 bp, Homo sapiens
  source 1..21: mol_type = genomic DNA
aacatgcaatccctggaattc

SEQ ID NO: 408 - DNA, 21 bp, Homo sapiens
  source 1..21: mol_type = genomic DNA
agttgtttcaggacaggatct

SEQ ID NO: 409 - DNA, 21 bp, Homo sapiens
  source 1..21: mol_type = genomic DNA
tcctcctgcctttaataagct

SEQ ID NO: 410 - DNA, 21 bp, Homo sapiens
  source 1..21: mol_type = genomic DNA
ttacaaggcatctgacaggaa

SEQ ID NO: 411 - DNA, 21 bp, Homo sapiens
  source 1..21: mol_type = genomic DNA
ttactggtaggtttgagcaca

SEQ ID NO: 412 - DNA, 22 bp, Homo sapiens
  source 1..22: mol_type = genomic DNA
gagctacgttctttctcatcac

SEQ ID NO: 413 - DNA, 21 bp, Homo sapiens
  source 1..21: mol_type = genomic DNA
caccaattaaagtgtgctgca

SEQ ID NO: 414 - DNA, 21 bp, Homo sapiens
  source 1..21: mol_type = genomic DNA
tcccttccaaagtgccttata

SEQ ID NO: 415 - DNA, 21 bp, Homo sapiens
  source 1..21: mol_type = genomic DNA
tggttggtttgggatacttga

SEQ ID NO: 416 - DNA, 21 bp, Homo sapiens
  source 1..21: mol_type = genomic DNA
gaacccaaatcgatcatgcat

SEQ ID NO: 417 - DNA, 21 bp, Homo sapiens
  source 1..21: mol_type = genomic DNA
agagttaaacgtgcaatgtgg

SEQ ID NO: 418 - DNA, 22 bp, Homo sapiens
  source 1..22: mol_type = genomic DNA
gttcgttggtcatagttgttgt

SEQ ID NO: 419 - DNA, 21 bp, Homo sapiens
  source 1..21: mol_type = genomic DNA
agtttagccaaaggattcagc

SEQ ID NO: 420 - DNA, 22 bp, Homo sapiens
  source 1..22: mol_type = genomic DNA
tcaaccatttagaaccaccttg

SEQ ID NO: 421 - DNA, 21 bp, Homo sapiens
  source 1..21: mol_type = genomic DNA
aatgtccactttagcggagag

SEQ ID NO: 422 - DNA, 22 bp, Homo sapiens
  source 1..22: mol_type = genomic DNA
ggagtattctgttcatgttggg

SEQ ID NO: 423 - DNA, 22 bp, Homo sapiens
  source 1..22: mol_type = genomic DNA
tttctagaattgaggaagggca

SEQ ID NO: 424 - DNA, 21 bp, Homo sapiens
  source 1..21: mol_type = genomic DNA
aggataagacgaggcatcaat

SEQ ID NO: 425 - DNA, 22 bp, Homo sapiens
  source 1..22: mol_type = genomic DNA
ttctgtgttgacatgtacctct

SEQ ID NO: 426 - DNA, 21 bp, Homo sapiens
  source 1..21: mol_type = genomic DNA
tccaacatttctctctgtccc

SEQ ID NO: 427 - DNA, 20 bp, Homo sapiens
  source 1..20: mol_type = genomic DNA
ataacgtgtactcctcagcc

SEQ ID NO: 428 - DNA, 21 bp, Homo sapiens
  source 1..21: mol_type = genomic DNA
gcacttggaggatgtaaagac

SEQ ID NO: 429 - DNA, 21 bp, Homo sapiens
  source 1..21: mol_type = genomic DNA
tgtatgctttaggacccagtt

SEQ ID NO: 430 - DNA, 22 bp, Homo sapiens
  source 1..22: mol_type = genomic DNA
aactccacaggaatctttctga

SEQ ID NO: 431 - DNA, 20 bp, Homo sapiens
  source 1..20: mol_type = genomic DNA
catttctcctgggaccgaat

SEQ ID NO: 432 - DNA, 21 bp, Homo sapiens
  source 1..21: mol_type = genomic DNA
ttctgaagctgacgaaattcc

SEQ ID NO: 433 - DNA, 21 bp, Homo sapiens
  source 1..21: mol_type = genomic DNA
gttgcttagtccttgcttcac

SEQ ID NO: 434 - DNA, 21 bp, Homo sapiens
  source 1..21: mol_type = genomic DNA
aggtcattggtctgcagttat

SEQ ID NO: 435 - DNA, 21 bp, Homo sapiens
  source 1..21: mol_type = genomic DNA
agcatttagagaacagcagtc

SEQ ID NO: 436 - DNA, 21 bp, Homo sapiens
  source 1..21: mol_type = genomic DNA
gtgtaagaagtggttgggttt

SEQ ID NO: 437 - DNA, 22 bp, Homo sapiens
  source 1..22: mol_type = genomic DNA
aaaggcagagcagtgtatttag

SEQ ID NO: 438 - DNA, 22 bp, Homo sapiens
  source 1..22: mol_type = genomic DNA
agacaagagaacaatcaggtga

SEQ ID NO: 439 - DNA, 21 bp, Homo sapiens
  source 1..21: mol_type = genomic DNA
caaagaagctctaggacagga

SEQ ID NO: 440 - DNA, 21 bp, Homo sapiens
  source 1..21: mol_type = genomic DNA
tggtggaggaaatcaatgttg

SEQ ID NO: 441 - DNA, 20 bp, Homo sapiens
  source 1..20: mol_type = genomic DNA
cacaagggaggaaacgttct

SEQ ID NO: 442 - DNA, 21 bp, Homo sapiens
  source 1..21: mol_type = genomic DNA
tgagatttagtgccagctaga

SEQ ID NO: 443 - DNA, 21 bp, Homo sapiens
  source 1..21: mol_type = genomic DNA
aggattagtttggctcctcag

SEQ ID NO: 444 - DNA, 21 bp, Homo sapiens
  source 1..21: mol_type = genomic DNA
cctgcactatttcctcaaagc

SEQ ID NO: 445 - DNA, 21 bp, Homo sapiens
  source 1..21: mol_type = genomic DNA
caatttccttctcactgagcc

SEQ ID NO: 446 - DNA, 21 bp, Homo sapiens
  source 1..21: mol_type = genomic DNA
acgcttcccaaatctatctgg

SEQ ID NO: 447 - DNA, 22 bp, Homo sapiens
  source 1..22: mol_type = genomic DNA
cttatttgtgtgcccaatacca

SEQ ID NO: 448 - DNA, 21 bp, Homo sapiens
  source 1..21: mol_type = genomic DNA
ttgcagcaggaacaccataaa

SEQ ID NO: 449 - DNA, 21 bp, Homo sapiens
  source 1..21: mol_type = genomic DNA
ctgttcatgttgctaccacag

SEQ ID NO: 450 - DNA, 21 bp, Homo sapiens
  source 1..21: mol_type = genomic DNA
ctgccttagattcactttcgg

SEQ ID NO: 451 - DNA, 21 bp, Homo sapiens
  source 1..21: mol_type = genomic DNA
ccatctgtgaggtcttctttg

SEQ ID NO: 452 - DNA, 21 bp, Homo sapiens
  source 1..21: mol_type = genomic DNA
tccttggttgtgtatttagcc

SEQ ID NO: 453 - DNA, 20 bp, Homo sapiens
  source 1..20: mol_type = genomic DNA
agactcaactcacattggcc

SEQ ID NO: 454 - DNA, 20 bp, Homo sapiens
  source 1..20: mol_type = genomic DNA
ggtctgactctgtggtttgg

SEQ ID NO: 455 - DNA, 21 bp, Homo sapiens
  source 1..21: mol_type = genomic DNA
tttcatttcatcctgcccatg

SEQ ID NO: 456 - DNA, 21 bp, Homo sapiens
  source 1..21: mol_type = genomic DNA
ttctgttattcgccatcagtc

SEQ ID NO: 457 - DNA, 20 bp, Homo sapiens
  source 1..20: mol_type = genomic DNA
gaattgggaacttgggaagc

SEQ ID NO: 458 - DNA, 21 bp, Homo sapiens
  source 1..21: mol_type = genomic DNA
gaactttggagaggacagtgt

SEQ ID NO: 459 - DNA, 21 bp, Homo sapiens
  source 1..21: mol_type = genomic DNA
aactgtcatgtgtgtctgcta

SEQ ID NO: 460 - DNA, 21 bp, Homo sapiens
  source 1..21: mol_type = genomic DNA
tgattccttccacctaccaaa

SEQ ID NO: 461 - DNA, 21 bp, Homo sapiens
  source 1..21: mol_type = genomic DNA
gccaaggtccattatctcaag

SEQ ID NO: 462 - DNA, 21 bp, Homo sapiens
  source 1..21: mol_type = genomic DNA
gaacctgcattgtcattctct

SEQ ID NO: 463 - DNA, 22 bp, Homo sapiens
  source 1..22: mol_type = genomic DNA
aagaacatcaacaaactccagg

SEQ ID NO: 464 - DNA, 21 bp, Homo sapiens
  source 1..21: mol_type = genomic DNA
tcaattctctttcacacgtgc

SEQ ID NO: 465 - DNA, 21 bp, Homo sapiens
  source 1..21: mol_type = genomic DNA
aggtgctggatcttgaattca

SEQ ID NO: 466 - DNA, 21 bp, Homo sapiens
  source 1..21: mol_type = genomic DNA
tccctctacccgaatctctta

SEQ ID NO: 467 - DNA, 21 bp, Homo sapiens
  source 1..21: mol_type = genomic DNA
tgggtttaaaggacactagca

SEQ ID NO: 468 - DNA, 21 bp, Homo sapiens
  source 1..21: mol_type = genomic DNA
cgaaggtcacacagtttagtc

SEQ ID NO: 469 - DNA, 21 bp, Homo sapiens
  source 1..21: mol_type = genomic DNA
atgtgccttgttgattgatgg

SEQ ID NO: 470 - DNA, 21 bp, Homo sapiens
  source 1..21: mol_type = genomic DNA
agatggtatgtcacaaagcac

SEQ ID NO: 471 - DNA, 21 bp, Homo sapiens
  source 1..21: mol_type = genomic DNA
acactttggagagcttcagat

SEQ ID NO: 472 - DNA, 22 bp, Homo sapiens
  source 1..22: mol_type = genomic DNA
gtgcccagaattatttgtgtct

SEQ ID NO: 473 - DNA, 21 bp, Homo sapiens
  source 1..21: mol_type = genomic DNA
gctctcttgtggaaacgatta

SEQ ID NO: 474 - DNA, 21 bp, Homo sapiens
  source 1..21: mol_type = genomic DNA
agtttgtttctctggcctact

SEQ ID NO: 475 - DNA, 21 bp, Homo sapiens
  source 1..21: mol_type = genomic DNA
accacctcaaagatttcatgg

SEQ ID NO: 476 - DNA, 22 bp, Homo sapiens
  source 1..22: mol_type = genomic DNA
gtcttcatctatttcgtgagcc

SEQ ID NO: 477 - DNA, 21 bp, Homo sapiens
  source 1..21: mol_type = genomic DNA
tcatcccagattcagaatgcc

SEQ ID NO: 478 - DNA, 21 bp, Homo sapiens
  source 1..21: mol_type = genomic DNA
cgttcaatgaagtcccttgtc

SEQ ID NO: 479 - DNA, 21 bp, Homo sapiens
  source 1..21: mol_type = genomic DNA
ttcacaagaactctgctggat

SEQ ID NO: 480 - DNA, 21 bp, Homo sapiens
  source 1..21: mol_type = genomic DNA
gaagccttctagtgggactaa

SEQ ID NO: 481 - DNA, 21 bp, Homo sapiens
  source 1..21: mol_type = genomic DNA
gttagggtcatgggtcacttt

SEQ ID NO: 482 - DNA, 21 bp, Homo sapiens
  source 1..21: mol_type = genomic DNA
gcctttgtagagtggacttct

SEQ ID NO: 483 - DNA, 21 bp, Homo sapiens
  source 1..21: mol_type = genomic DNA
ggcttcttgatactgctttcc

SEQ ID NO: 484 - DNA, 21 bp, Homo sapiens
  source 1..21: mol_type = genomic DNA
aggtgtgcaatactcaaggaa

SEQ ID NO: 485 - DNA, 21 bp, Homo sapiens
  source 1..21: mol_type = genomic DNA
aaggtcttaggagtgaggaca

SEQ ID NO: 486 - DNA, 22 bp, Homo sapiens
  source 1..22: mol_type = genomic DNA
tcgtgctatttcagtcagatct

SEQ ID NO: 487 - DNA, 21 bp, Homo sapiens
  source 1..21: mol_type = genomic DNA
tgtccagccgtaacatttcat

SEQ ID NO: 488 - DNA, 21 bp, Homo sapiens
  source 1..21: mol_type = genomic DNA
aatggacatctttcaggtctg

SEQ ID NO: 489 - DNA, 21 bp, Homo sapiens
  source 1..21: mol_type = genomic DNA
tcaaattgggatcgcattagg

SEQ ID NO: 490 - DNA, 22 bp, Homo sapiens
  source 1..22: mol_type = genomic DNA
atgcctgggtttattcatcttg

SEQ ID NO: 491 - DNA, 21 bp, Homo sapiens
  source 1..21: mol_type = genomic DNA
ggagaagtttgggtttgatcc

SEQ ID NO: 492 - DNA, 21 bp, Homo sapiens
  source 1..21: mol_type = genomic DNA
tgataggagccatcagttctt

SEQ ID NO: 493 - DNA, 21 bp, Homo sapiens
  source 1..21: mol_type = genomic DNA
agcagatgttgttagctttcc

SEQ ID NO: 494 - DNA, 21 bp, Homo sapiens
  source 1..21: mol_type = genomic DNA
ttctctgtcacttccatgagg

SEQ ID NO: 495 - DNA, 22 bp, Homo sapiens
  source 1..22: mol_type = genomic DNA
ccagtaacttattctgccagag

SEQ ID NO: 496 - DNA, 21 bp, Homo sapiens
  source 1..21: mol_type = genomic DNA
tgagagacaagctgcattaca

SEQ ID NO: 497 - DNA, 22 bp, Homo sapiens
  source 1..22: mol_type = genomic DNA
gcacagaaattacagttcatgg

SEQ ID NO: 498 - DNA, 21 bp, Homo sapiens
  source 1..21: mol_type = genomic DNA
gctctcgtatctgacagtgaa

SEQ ID NO: 499 - DNA, 21 bp, Homo sapiens
  source 1..21: mol_type = genomic DNA
caggcatcttggtttgtagtg

SEQ ID NO: 500 - DNA, 21 bp, Homo sapiens
  source 1..21: mol_type = genomic DNA
cgtgatgaacagtgatgactt

SEQ ID NO: 501 - DNA, 21 bp, Homo sapiens
  source 1..21: mol_type = genomic DNA
cgccatttgttctcctattca

SEQ ID NO: 502 - DNA, 21 bp, Homo sapiens
  source 1..21: mol_type = genomic DNA
ttcgttagctactgggtactc

SEQ ID NO: 503 - DNA, 21 bp, Homo sapiens
  source 1..21: mol_type = genomic DNA
ccaccctttacacctatccaa

SEQ ID NO: 504 - DNA, 21 bp, Homo sapiens
  source 1..21: mol_type = genomic DNA
agagtgcacaaaggagaagac

SEQ ID NO: 505 - DNA, 22 bp, Homo sapiens
  source 1..22: mol_type = genomic DNA
tctactgtgtcaaagcagattg

SEQ ID NO: 506 - DNA, 21 bp, Homo sapiens
  source 1..21: mol_type = genomic DNA
ttcttcctagccttcctttcc

SEQ ID NO: 507 - DNA, 21 bp, Homo sapiens
  source 1..21: mol_type = genomic DNA
tctctggctgtgcagtaaatt

SEQ ID NO: 508 - DNA, 21 bp, Homo sapiens
  source 1..21: mol_type = genomic DNA
aaactcccagctttaatccct

SEQ ID NO: 509 - DNA, 21 bp, Homo sapiens
  source 1..21: mol_type = genomic DNA
aagaatgggtgagttgggttc

SEQ ID NO: 510 - DNA, 21 bp, Homo sapiens
  source 1..21: mol_type = genomic DNA
ggaaactgaattgccaagtct

SEQ ID NO: 511 - DNA, 20 bp, Homo sapiens
  source 1..20: mol_type = genomic DNA
ctcccaacttttatgcagcc

SEQ ID NO: 512 - DNA, 21 bp, Homo sapiens
  source 1..21: mol_type = genomic DNA
gctcagggaatatcttgggaa

SEQ ID NO: 513 - DNA, 21 bp, Homo sapiens
  source 1..21: mol_type = genomic DNA
acattcagcaagtaggaagga

SEQ ID NO: 514 - DNA, 20 bp, Homo sapiens
  source 1..20: mol_type = genomic DNA
cccagaagagcagtaacaac

SEQ ID NO: 515 - DNA, 20 bp, Homo sapiens
  source 1..20: mol_type = genomic DNA
gaaaaagggggataggcatt

SEQ ID NO: 516 - DNA, 21 bp, Homo sapiens
  source 1..21: mol_type = genomic DNA
cccaacaactgcaataaaagg

SEQ ID NO: 517 - DNA, 20 bp, Homo sapiens
  source 1..20: mol_type = genomic DNA
accgaaattgcttgctctta

SEQ ID NO: 518 - DNA, 20 bp, Homo sapiens
  source 1..20: mol_type = genomic DNA
ccttagtgtgacaggacagg

SEQ ID NO: 519 - DNA, 20 bp, Homo sapiens
  source 1..20: mol_type = genomic DNA
ccaagacaactaggccaatg

SEQ ID NO: 520 - DNA, 21 bp, Homo sapiens
  source 1..21: mol_type = genomic DNA
gaagagatgatgcaaaagagc

SEQ ID NO: 521 - DNA, 20 bp, Homo sapiens
  source 1..20: mol_type = genomic DNA
tccaagcaagggatctcttc

SEQ ID NO: 522 - DNA, 20 bp, Homo sapiens
  source 1..20: mol_type = genomic DNA
gaatggtcagggaagggttt

SEQ ID NO: 523 - DNA, 20 bp, Homo sapiens
  source 1..20: mol_type = genomic DNA
agtcttcagccatcttcctg

SEQ ID NO: 524 - DNA, 21 bp, Homo sapiens
  source 1..21: mol_type = genomic DNA
gcatttccaggctttacaagt

SEQ ID NO: 525 - DNA, 20 bp, Homo sapiens
  source 1..20: mol_type = genomic DNA
ctctctctccctggtcagat

SEQ ID NO: 526 - DNA, 20 bp, Homo sapiens
  source 1..20: mol_type = genomic DNA
cagcaattctcaggctcaga

SEQ ID NO: 527 - DNA, 21 bp, Homo sapiens
  source 1..21: mol_type = genomic DNA
tctgaaacaaagcctccttag

SEQ ID NO: 528 - DNA, 21 bp, Homo sapiens
  source 1..21: mol_type = genomic DNA
aggataaggtttcccatgctc

SEQ ID NO: 529 - DNA, 21 bp, Homo sapiens
  source 1..21: mol_type = genomic DNA
atgtatctgaaggagctctgc

SEQ ID NO: 530 - DNA, 20 bp, Homo sapiens
  source 1..20: mol_type = genomic DNA
ggccttcatcacaaacaaca

SEQ ID NO: 531 - DNA, 20 bp, Homo sapiens
  source 1..20: mol_type = genomic DNA
tgtgtcccatctacaaagcc

SEQ ID NO: 532 - DNA, 20 bp, Homo sapiens
  source 1..20: mol_type = genomic DNA
tccttgaactctttccaagc

SEQ ID NO: 533 - DNA, 20 bp, Homo sapiens
  source 1..20: mol_type = genomic DNA
tgttttcctgtccaagtcca

SEQ ID NO: 534 - DNA, 19 bp, Homo sapiens
  source 1..19: mol_type = genomic DNA
cagcatccatcgctcgaaa

SEQ ID NO: 535 - DNA, 20 bp, Homo sapiens
  source 1..20: mol_type = genomic DNA
ggtattggtgggggaaatga

SEQ ID NO: 536 - DNA, 24 bp, Homo sapiens
  source 1..24: mol_type = genomic DNA
gcactgctgtaaaagatctatgag

SEQ ID NO: 537 - DNA, 19 bp, Homo sapiens
  source 1..19: mol_type = genomic DNA
actcaaaggcacatttcgc

SEQ ID NO: 538 - DNA, 22 bp, Homo sapiens
  source 1..22: mol_type = genomic DNA
attctattccgatcacagcctt

SEQ ID NO: 539 - DNA, 20 bp, Homo sapiens
  source 1..20: mol_type = genomic DNA
ctacctgacaaatggagctt

SEQ ID NO: 540 - DNA, 21 bp, Homo sapiens
  source 1..21: mol_type = genomic DNA
gaaatggccatgtgtactgag

SEQ ID NO: 541 - DNA, 20 bp, Homo sapiens
  source 1..20: mol_type = genomic DNA
gaagcctctcaagctacaag

SEQ ID NO: 542 - DNA, 22 bp, Homo sapiens
  source 1..22: mol_type = genomic DNA
gaatgagattagggagcaaagt

SEQ ID NO: 543 - DNA, 20 bp, Homo sapiens
  source 1..20: mol_type = genomic DNA
ggaagtaagaagagtgctgc

SEQ ID NO: 544 - DNA, 20 bp, Homo sapiens
  source 1..20: mol_type = genomic DNA
gctcctgattgaagaagtgt

SEQ ID NO: 545 - DNA, 19 bp, Homo sapiens
  source 1..19: mol_type = genomic DNA
ctgctcctttgtctcctgt

SEQ ID NO: 546 - DNA, 21 bp, Homo sapiens
  source 1..21: mol_type = genomic DNA
taaggtgagagtgtgaggaag

SEQ ID NO: 547 - DNA, 21 bp, Homo sapiens
  source 1..21: mol_type = genomic DNA
ccaggggaacatttactcaga

SEQ ID NO: 548 - DNA, 20 bp, Homo sapiens
  source 1..20: mol_type = genomic DNA
agggtacatgtaaggcagct

SEQ ID NO: 549 - DNA, 20 bp, Homo sapiens
  source 1..20: mol_type = genomic DNA
ttctgtggcattgtgtcttg

SEQ ID NO: 550 - DNA, 20 bp, Homo sapiens
  source 1..20: mol_type = genomic DNA
ccccaaatttaccccactct

SEQ ID NO: 551 - DNA, 20 bp, Homo sapiens
  source 1..20: mol_type = genomic DNA
atccctagcactttcaggac

SEQ ID NO: 552 - DNA, 20 bp, Homo sapiens
  source 1..20: mol_type = genomic DNA
ttaccaatccatccagcctg

SEQ ID NO: 553 - DNA, 20 bp, Homo sapiens
  source 1..20: mol_type = genomic DNA
agaagctaaacaggttgccc

SEQ ID NO: 554 - DNA, 20 bp, Homo sapiens
  source 1..20: mol_type = genomic DNA
cataagagcacagccaagat

SEQ ID NO: 555 - DNA, 20 bp, Homo sapiens
  source 1..20: mol_type = genomic DNA
tgtcctgccacttttacatc

SEQ ID NO: 556 - DNA, 21 bp, Homo sapiens
  source 1..21: mol_type = genomic DNA
gagctaagcagaacctaagga

SEQ ID NO: 557 - DNA, 21 bp, Homo sapiens
  source 1..21: mol_type = genomic DNA
ttaagcaacaggaacctaccc

SEQ ID NO: 558 - DNA, 21 bp, Homo sapiens
  source 1..21: mol_type = genomic DNA
gccaagggtaatcatagcaac

SEQ ID NO: 559 - DNA, 21 bp, Homo sapiens
  source 1..21: mol_type = genomic DNA
tcataatgaaacccttgctgc

SEQ ID NO: 560 - DNA, 21 bp, Homo sapiens
  source 1..21: mol_type = genomic DNA
aatcctagtgcatgagactcc

SEQ ID NO: 561 - DNA, 21 bp, Homo sapiens
  source 1..21: mol_type = genomic DNA
tactgcctgcatcattaccac

SEQ ID NO: 562 - DNA, 21 bp, Homo sapiens
  source 1..21: mol_type = genomic DNA
attaacaatgaggagccaggt

SEQ ID NO: 563 - DNA, 21 bp, Homo sapiens
  source 1..21: mol_type = genomic DNA
gagagatggttgagaaatgcc

SEQ ID NO: 564 - DNA, 21 bp, Homo sapiens
  source 1..21: mol_type = genomic DNA
actacaaccaccaattacagc

SEQ ID NO: 565 - DNA, 21 bp, Homo sapiens
  source 1..21: mol_type = genomic DNA
agtgacatttccaagggcttt

SEQ ID NO: 566 - DNA, 21 bp, Homo sapiens
  source 1..21: mol_type = genomic DNA
ggagatgggaagacgattaga

SEQ ID NO: 567 - DNA, 22 bp, Homo sapiens
  source 1..22: mol_type = genomic DNA
agtctttcagtcttacatgggt

SEQ ID NO: 568 - DNA, 21 bp, Homo sapiens
  source 1..21: mol_type = genomic DNA
tagtttctgtgatcctggcag

SEQ ID NO: 569 - DNA, 20 bp, Homo sapiens
  source 1..20: mol_type = genomic DNA
tttctcccagctgttcctag

SEQ ID NO: 570 - DNA, 21 bp, Homo sapiens
  source 1..21: mol_type = genomic DNA
tacggaacttcgaatcaactc

SEQ ID NO: 571 - DNA, 21 bp, Homo sapiens
  source 1..21: mol_type = genomic DNA
tcaagtcaccctcattgtagg

SEQ ID NO: 572 - DNA, 21 bp, Homo sapiens
  source 1..21: mol_type = genomic DNA
tgtaacgtggatgtgagattg

SEQ ID NO: 573 - DNA, 21 bp, Homo sapiens
  source 1..21: mol_type = genomic DNA
ttgagctaagtctgcatcact

SEQ ID NO: 574 - DNA, 21 bp, Homo sapiens
  source 1..21: mol_type = genomic DNA
ctagagaaagcaacgcctaag

SEQ ID NO: 575 - DNA, 21 bp, Homo sapiens
  source 1..21: mol_type = genomic DNA
agcaccttccatagcttcttt

SEQ ID NO: 576 - DNA, 21 bp, Homo sapiens
  source 1..21: mol_type = genomic DNA
gtgtcttctgatggccaaatg

SEQ ID NO: 577 - DNA, 21 bp, Homo sapiens
  source 1..21: mol_type = genomic DNA
aatcaggtgaaaggtacctcc

SEQ ID NO: 578 - DNA, 21 bp, Homo sapiens
  source 1..21: mol_type = genomic DNA
ccttcacaattcagggaacaa

SEQ ID NO: 579 - DNA, 21 bp, Homo sapiens
  source 1..21: mol_type = genomic DNA
tggacccagttctatgcaatt

SEQ ID NO: 580 - DNA, 21 bp, Homo sapiens
  source 1..21: mol_type = genomic DNA
aatgacccttacaactccgaa

SEQ ID NO: 581 - DNA, 21 bp, Homo sapiens
  source 1..21: mol_type = genomic DNA
tttgggaagtgattgtgaagg

SEQ ID NO: 582 - DNA, 21 bp, Homo sapiens
  source 1..21: mol_type = genomic DNA
tcagctgcatagaccttgttt

SEQ ID NO: 583 - DNA, 21 bp, Homo sapiens
  source 1..21: mol_type = genomic DNA
tcatttgttctcattacgggc

SEQ ID NO: 584 - DNA, 20 bp, Homo sapiens
  source 1..20: mol_type = genomic DNA
ttctacctgggttctcttgg

SEQ ID NO: 585 - DNA, 21 bp, Homo sapiens
  source 1..21: mol_type = genomic DNA
taacttcctgagcacacatca

SEQ ID NO: 586 - DNA, 21 bp, Homo sapiens
  source 1..21: mol_type = genomic DNA
gggtaaattcaggaatgcaca

SEQ ID NO: 587 - DNA, 21 bp, Homo sapiens
  source 1..21: mol_type = genomic DNA
atttcttctggtgagtttgcg

SEQ ID NO: 588 - DNA, 21 bp, Homo sapiens
  source 1..21: mol_type = genomic DNA
cctcttcctgacatgttgttg

SEQ ID NO: 589 - DNA, 21 bp, Homo sapiens
  source 1..21: mol_type = genomic DNA
gttggtgccagattgtaactt

SEQ ID NO: 590 - DNA, 21 bp, Homo sapiens
  source 1..21: mol_type = genomic DNA
gcctggctcaataatagtcct

SEQ ID NO: 591 - DNA, 21 bp, Homo sapiens
  source 1..21: mol_type = genomic DNA
atgttgccttctctacgtttg

SEQ ID NO: 592 - DNA, 20 bp, Homo sapiens
  source 1..20: mol_type = genomic DNA
gagtggagcgctacctttat

SEQ ID NO: 593 - DNA, 20 bp, Homo sapiens
  source 1..20: mol_type = genomic DNA
agaatgggaaatgggaagga

SEQ ID NO: 594 - DNA, 20 bp, Homo sapiens
  source 1..20: mol_type = genomic DNA
cacaatacatgggctgcttt

SEQ ID NO: 595 - DNA, 21 bp, Homo sapiens
  source 1..21: mol_type = genomic DNA
ccactccaactctgcttttac

SEQ ID NO: 596 - DNA, 21 bp, Homo sapiens
  source 1..21: mol_type = genomic DNA
gatgtggattgtctttgttgc

SEQ ID NO: 597 - DNA, 22 bp, Homo sapiens
  source 1..22: mol_type = genomic DNA
agcctttcattgcacatttcag

SEQ ID NO: 598 - DNA, 20 bp, Homo sapiens
  source 1..20: mol_type = genomic DNA
tcccaccacaagaccaattt

SEQ ID NO: 599 - DNA, 21 bp, Homo sapiens
  source 1..21: mol_type = genomic DNA
gaagataggtggtggagttca

SEQ ID NO: 600 - DNA, 21 bp, Homo sapiens
  source 1..21: mol_type = genomic DNA
ctgtttgaatgaagttggctg

SEQ ID NO: 601 - DNA, 21 bp, Homo sapiens
  source 1..21: mol_type = genomic DNA
tatacatgggtgggatttgtc

SEQ ID NO: 602 - DNA, 21 bp, Homo sapiens
  source 1..21: mol_type = genomic DNA
tttgtgatggaccatctaacc

SEQ ID NO: 603 - DNA, 20 bp, Homo sapiens
  source 1..20: mol_type = genomic DNA
gaagatctggtgtcccacta

SEQ ID NO: 604 - DNA, 20 bp, Homo sapiens
  source 1..20: mol_type = genomic DNA
atctgaagatctccgtggta

SEQ ID NO: 605 - DNA, 21 bp, Homo sapiens
  source 1..21: mol_type = genomic DNA
atgtatgaaccatttcctgct

SEQ ID NO: 606 - DNA, 22 bp, Homo sapiens
  source 1..22: mol_type = genomic DNA
agcacagaattgaatgaaggaa

SEQ ID NO: 607 - DNA, 20 bp, Homo sapiens
  source 1..20: mol_type = genomic DNA
gcatgagtaaggctgaagtg

SEQ ID NO: 608 - DNA, 24 bp, Homo sapiens
  source 1..24: mol_type = genomic DNA
aaaggcttatattgcttttgaatc

SEQ ID NO: 609 - DNA, 20 bp, Homo sapiens
  source 1..20: mol_type = genomic DNA
ttgctgttgttgggatcaag

SEQ ID NO: 610 - DNA, 20 bp, Homo sapiens
  source 1..20: mol_type = genomic DNA
gcttctgcatccacctatct

SEQ ID NO: 611 - DNA, 20 bp, Homo sapiens
  source 1..20: mol_type = genomic DNA
aaaagctgcctaaaatgcca

SEQ ID NO: 612 - DNA, 20 bp, Homo sapiens
  source 1..20: mol_type = genomic DNA
agtcagcaagttagcagaaa

SEQ ID NO: 613 - DNA, 20 bp, Homo sapiens
  source 1..20: mol_type = genomic DNA
cccacatttatcccttgtcc

SEQ ID NO: 614 - DNA, 20 bp, Homo sapiens
  source 1..20: mol_type = genomic DNA
tgtctgattccatctttccc

SEQ ID NO: 615 - DNA, 19 bp, Homo sapiens
  source 1..19: mol_type = genomic DNA
cagccaccaaaacacaatg

SEQ ID NO: 616 - DNA, 20 bp, Homo sapiens
  source 1..20: mol_type = genomic DNA
aaggcctgttttgtgtgtag

SEQ ID NO: 617 - DNA, 21 bp, Homo sapiens
  source 1..21: mol_type = genomic DNA
acagctcacagatctttaagc

SEQ ID NO: 618 - DNA, 23 bp, Homo sapiens
  source 1..23: mol_type = genomic DNA
ggcattataaagagatagctcca

SEQ ID NO: 619 - DNA, 20 bp, Homo sapiens
  source 1..20: mol_type = genomic DNA
tgtttttccttgccctgtaa

SEQ ID NO: 620 - DNA, 20 bp, Homo sapiens
  source 1..20: mol_type = genomic DNA
taaccagatgaatgagggca

SEQ ID NO: 621 - DNA, 20 bp, Homo sapiens
  source 1..20: mol_type = genomic DNA
caacaagccaaaaccacatc

SEQ ID NO: 622 - DNA, 20 bp, Homo sapiens
  source 1..20: mol_type = genomic DNA
gttggttcttgaagacctga

SEQ ID NO: 623 - DNA, 22 bp, Homo sapiens
  source 1..22: mol_type = genomic DNA
tgtggtaagtagtctctaaaga

SEQ ID NO: 624 - DNA, 20 bp, Homo sapiens
  source 1..20: mol_type = genomic DNA
accaaatttccagatcacgg

SEQ ID NO: 625 - DNA, 20 bp, Homo sapiens
  source 1..20: mol_type = genomic DNA
aatgaatggtcatggctcac

SEQ ID NO: 626 - DNA, 20 bp, Homo sapiens
  source 1..20: mol_type = genomic DNA
gccctgaagcacattaaagt

SEQ ID NO: 627 - DNA, 20 bp, Homo sapiens
  source 1..20: mol_type = genomic DNA
gcctccaggtttatgacaac

SEQ ID NO: 628 - DNA, 20 bp, Homo sapiens
  source 1..20: mol_type = genomic DNA
cagctctattccccttctga

SEQ ID NO: 629 - DNA, 20 bp, Homo sapiens
  source 1..20: mol_type = genomic DNA
ccttggaagggaaagttgat

SEQ ID NO: 630 - DNA, 18 bp, Homo sapiens
  source 1..18: mol_type = genomic DNA
gtcccaccctgctcttag

SEQ ID NO: 631 - DNA, 20 bp, Homo sapiens
  source 1..20: mol_type = genomic DNA
cagagtaagacagtgggaca

SEQ ID NO: 632 - DNA, 20 bp, Homo sapiens
  source 1..20: mol_type = genomic DNA
aagtgtggtgcataaaggat

SEQ ID NO: 633 - DNA, 20 bp, Homo sapiens
  source 1..20: mol_type = genomic DNA
ctgtaagaaggagggtttgg

SEQ ID NO: 634 - DNA, 20 bp, Homo sapiens
  source 1..20: mol_type = genomic DNA
gaggttgatgagaggtaggg

SEQ ID NO: 635 - DNA, 20 bp, Homo sapiens
  source 1..20: mol_type = genomic DNA
agccagggatattgttgaag

SEQ ID NO: 636 - DNA, 20 bp, Homo sapiens
  source 1..20: mol_type = genomic DNA
caggtaagtgtgtgttccag

SEQ ID NO: 637 - DNA, 20 bp, Homo sapiens
  source 1..20: mol_type = genomic DNA
ttgatttccatgcagaaggg

SEQ ID NO: 638 - DNA, 20 bp, Homo sapiens
  source 1..20: mol_type = genomic DNA
taatttggccttaggggttg

SEQ ID NO: 639 - DNA, 21 bp, Homo sapiens
  source 1..21: mol_type = genomic DNA
tccataaaaggtgcttaaagc

SEQ ID NO: 640 - DNA, 20 bp, Homo sapiens
  source 1..20: mol_type = genomic DNA
ttgtatcacaccatcgtgga

SEQ ID NO: 641 - DNA, 20 bp, Homo sapiens
  source 1..20: mol_type = genomic DNA
actgctgagaacaatcatgc

SEQ ID NO: 642 - DNA, 20 bp, Homo sapiens
  source 1..20: mol_type = genomic DNA
ggtgtggagaatttgtttgc

SEQ ID NO: 643 - DNA, 20 bp, Homo sapiens
  source 1..20: mol_type = genomic DNA
tgatattaggcggtggctta

SEQ ID NO: 644 - DNA, 20 bp, Homo sapiens
  source 1..20: mol_type = genomic DNA
tctcacctaaaatctggggc

SEQ ID NO: 645 - DNA, 22 bp, Homo sapiens
  source 1..22: mol_type = genomic DNA
aggactgtgacactttatcttt

SEQ ID NO: 646 - DNA, 21 bp, Homo sapiens
  source 1..21: mol_type = genomic DNA
atgcgaggtagaaaatgagag

SEQ ID NO: 647 - DNA, 21 bp, Homo sapiens
  source 1..21: mol_type = genomic DNA
tgtggctttaaggttctgaag

SEQ ID NO: 648 - DNA, 20 bp, Homo sapiens
  source 1..20: mol_type = genomic DNA
tcgttgctattctgctttga

SEQ ID NO: 649 - DNA, 20 bp, Homo sapiens
  source 1..20: mol_type = genomic DNA
tcccttttgtggtttcttgg

SEQ ID NO: 650 - DNA, 20 bp, Homo sapiens
  source 1..20: mol_type = genomic DNA
ttgccgcactcttcattaat

SEQ ID NO: 651 - DNA, 20 bp, Homo sapiens
  source 1..20: mol_type = genomic DNA
actggcttctcctcattagt

SEQ ID NO: 652 - DNA, 20 bp, Homo sapiens
  source 1..20: mol_type = genomic DNA
actgatttgccatgtagagc

SEQ ID NO: 653 - DNA, 20 bp, Homo sapiens
  source 1..20: mol_type = genomic DNA
gaatgtcatattgcctgcca

SEQ ID NO: 654 - DNA, 20 bp, Homo sapiens
  source 1..20: mol_type = genomic DNA
tcactcgcttagaatgttgc

SEQ ID NO: 655 - DNA, 21 bp, Homo sapiens
  source 1..21: mol_type = genomic DNA
accattaacttcctgcaaact

SEQ ID NO: 656 - DNA, 20 bp, Homo sapiens
  source 1..20: mol_type = genomic DNA
taaagccccataccaggatt

SEQ ID NO: 657 - DNA, 20 bp, Homo sapiens
  source 1..20: mol_type = genomic DNA
ccaaaaatcacccatatgcg

SEQ ID NO: 658 - DNA, 20 bp, Homo sapiens
  source 1..20: mol_type = genomic DNA
ataacccaggtgcttcaaag

SEQ ID NO: 659 - DNA, 19 bp, Homo sapiens
  source 1..19: mol_type = genomic DNA
tccacagcagaagtaacga

SEQ ID NO: 660 - DNA, 21 bp, Homo sapiens
  source 1..21: mol_type = genomic DNA
aggaaagctatgaagaaaggg

SEQ ID NO: 661 - DNA, 20 bp, Homo sapiens
  source 1..20: mol_type = genomic DNA
agctccagagtgtcagtatt

SEQ ID NO: 662 - DNA, 22 bp, Homo sapiens
  source 1..22: mol_type = genomic DNA
ttgatttccagcactgaacttt

SEQ ID NO: 663 - DNA, 20 bp, Homo sapiens
  source 1..20: mol_type = genomic DNA
tgtttgatttttcaggctga

SEQ ID NO: 664 - DNA, 20 bp, Homo sapiens
  source 1..20: mol_type = genomic DNA
ctggtcattcctgagtgtct

SEQ ID NO: 665 - DNA, 24 bp, Homo sapiens
  source 1..24: mol_type = genomic DNA
tcctgttttacacttttctaactt

SEQ ID NO: 666 - DNA, 20 bp, Homo sapiens
  source 1..20: mol_type = genomic DNA
acctcaacctgttttagcac

SEQ ID NO: 667 - DNA, 20 bp, Homo sapiens
  source 1..20: mol_type = genomic DNA
cagtgtgtgtcatgccaaat

SEQ ID NO: 668 - DNA, 21 bp, Homo sapiens
  source 1..21: mol_type = genomic DNA
ggtctatgttaatcttgggcc

SEQ ID NO: 669 - DNA, 21 bp, Homo sapiens
  source 1..21: mol_type = genomic DNA
agccagtctgtatctaaaggt

SEQ ID NO: 670 - DNA, 20 bp, Homo sapiens
  source 1..20: mol_type = genomic DNA
actcttggggtttcttcagt

SEQ ID NO: 671 - DNA, 21 bp, Homo sapiens
  source 1..21: mol_type = genomic DNA
cgaaccaaaagcaaaatcctt

SEQ ID NO: 672 - DNA, 20 bp, Homo sapiens
  source 1..20: mol_type = genomic DNA
aatctatggaggtcactggg

SEQ ID NO: 673 - DNA, 20 bp, Homo sapiens
  source 1..20: mol_type = genomic DNA
aggtccttgtagtttgcttg

SEQ ID NO: 674 - DNA, 20 bp, Homo sapiens
  source 1..20: mol_type = genomic DNA
gtgagagccaatagagtgtg

SEQ ID NO: 675 - DNA, 20 bp, Homo sapiens
  source 1..20: mol_type = genomic DNA
gcatggtgtgtgaaagtgat

SEQ ID NO: 676 - DNA, 20 bp, Homo sapiens
  source 1..20: mol_type = genomic DNA
atgctgcttttgactgatgt

SEQ ID NO: 677 - DNA, 20 bp, Homo sapiens
  source 1..20: mol_type = genomic DNA
cgaagctgtattcctgtctc

SEQ ID NO: 678 - DNA, 19 bp, Homo sapiens
  source 1..19: mol_type = genomic DNA
atggactaactggagagcg

SEQ ID NO: 679 - DNA, 20 bp, Homo sapiens
  source 1..20: mol_type = genomic DNA
atgtcctgccagtaaacaca

SEQ ID NO: 680 - DNA, 20 bp, Homo sapiens
  source 1..20: mol_type = genomic DNA
tgccactaaacacctaagga

SEQ ID NO: 681 - DNA, 20 bp, Homo sapiens
  source 1..20: mol_type = genomic DNA
ttggaaattttggggtcagg

SEQ ID NO: 682 - DNA, 20 bp, Homo sapiens
  source 1..20: mol_type = genomic DNA
ttctgacctcccttactgag

SEQ ID NO: 683 - DNA, 19 bp, Homo sapiens
  source 1..19: mol_type = genomic DNA
tatgtgcttgcgatgtgtt

SEQ ID NO: 684 - DNA, 20 bp, Homo sapiens
  source 1..20: mol_type = genomic DNA
gaaccttagggccagtctat

SEQ ID NO: 685 - DNA, 21 bp, Homo sapiens
  source 1..21: mol_type = genomic DNA
agaacctgatgtgttttcctc

SEQ ID NO: 686 - DNA, 20 bp, Homo sapiens
  source 1..20: mol_type = genomic DNA
atgtgagagaagcaaaaccc

SEQ ID NO: 687 - DNA, 20 bp, Homo sapiens
  source 1..20: mol_type = genomic DNA
gtagttgtcttgagggcttt

SEQ ID NO: 688 - DNA, 20 bp, Homo sapiens
  source 1..20: mol_type = genomic DNA
cctggtcaacaacatatggg

SEQ ID NO: 689 - DNA, 21 bp, Homo sapiens
  source 1..21: mol_type = genomic DNA
agaatattgcatttggccaga

SEQ ID NO: 690 - DNA, 21 bp, Homo sapiens
  source 1..21: mol_type = genomic DNA
aaagctatgcaaatagtggca

SEQ ID NO: 691 - DNA, 20 bp, Homo sapiens
  source 1..20: mol_type = genomic DNA
agttcccaacagaggctaat

SEQ ID NO: 692 - DNA, 20 bp, Homo sapiens
  source 1..20: mol_type = genomic DNA
agttataggtgaggaagggc

SEQ ID NO: 693 - DNA, 20 bp, Homo sapiens
  source 1..20: mol_type = genomic DNA
cactgcaaaagaaggaggtt

SEQ ID NO: 694 - DNA, 21 bp, Homo sapiens
  source 1..21: mol_type = genomic DNA
tctcaacatcgctgatctagt

SEQ ID NO: 695 - DNA, 20 bp, Homo sapiens
  source 1..20: mol_type = genomic DNA
aggtagctggaaaaggagaa

SEQ ID NO: 696 - DNA, 21 bp, Homo sapiens
  source 1..21: mol_type = genomic DNA
tgaaattgcccagaattgagt

SEQ ID NO: 697 - DNA, 20 bp, Homo sapiens
  source 1..20: mol_type = genomic DNA
attttcctggacttctgaca

SEQ ID NO: 698 - DNA, 21 bp, Homo sapiens
  source 1..21: mol_type = genomic DNA
tgttattcctcttcctgtcca

SEQ ID NO: 699 - DNA, 20 bp, Homo sapiens
  source 1..20: mol_type = genomic DNA
taaccacacaactacagctt

SEQ ID NO: 700 - DNA, 20 bp, Homo sapiens
  source 1..20: mol_type = genomic DNA
attcaaaatggggacgagag

SEQ ID NO: 701 - DNA, 19 bp, Homo sapiens
  source 1..19: mol_type = genomic DNA
tcccagtttgctactctgg

SEQ ID NO: 702 - DNA, 24 bp, Homo sapiens
  source 1..24: mol_type = genomic DNA
tctcattatgtgaagattgctttc

SEQ ID NO: 703 - DNA, 23 bp, Homo sapiens
  source 1..23: mol_type = genomic DNA
ttaagattaagcagtcttcttgg

SEQ ID NO: 704 - DNA, 20 bp, Homo sapiens
  source 1..20: mol_type = genomic DNA
caacagatctgattctgccc

SEQ ID NO: 705 - DNA, 20 bp, Homo sapiens
  source 1..20: mol_type = genomic DNA
catgtgtttcaaagttggct

SEQ ID NO: 706 - DNA, 21 bp, Homo sapiens
  source 1..21: mol_type = genomic DNA
actatagcattagggtgaggg

SEQ ID NO: 707 - DNA, 20 bp, Homo sapiens
  source 1..20: mol_type = genomic DNA
gagatttggacatgctttca

SEQ ID NO: 708 - DNA, 19 bp, Homo sapiens
  source 1..19: mol_type = genomic DNA
cccaccaccagttgtcatc

SEQ ID NO: 709 - DNA, 21 bp, Homo sapiens
  source 1..21: mol_type = genomic DNA
gccactcacttcctagataat

SEQ ID NO: 710 - DNA, 20 bp, Homo sapiens
  source 1..20: mol_type = genomic DNA
acagtatctcagggccttat

SEQ ID NO: 711 - DNA, 21 bp, Homo sapiens
  source 1..21: mol_type = genomic DNA
tcagtagttcctcagatgcta

SEQ ID NO: 712 - DNA, 20 bp, Homo sapiens
  source 1..20: mol_type = genomic DNA
aatgcatgaaagtccaggaa

SEQ ID NO: 713 - DNA, 21 bp, Homo sapiens
  source 1..21: mol_type = genomic DNA
acatgcactcttgtcttatgc

SEQ ID NO: 714 - DNA, 22 bp, Homo sapiens
  source 1..22: mol_type = genomic DNA
cacatatactggctttctggtc

SEQ ID NO: 715 - DNA, 19 bp, Homo sapiens
  source 1..19: mol_type = genomic DNA
gcacatgtcattagcaggg

SEQ ID NO: 716 - DNA, 20 bp, Homo sapiens
  source 1..20: mol_type = genomic DNA
acatgctcaattatggagcc

SEQ ID NO: 717 - DNA, 20 bp, Homo sapiens
  source 1..20: mol_type = genomic DNA
acaaagacaggaatagggct

SEQ ID NO: 718 - DNA, 24 bp, Homo sapiens
  source 1..24: mol_type = genomic DNA
caatctgctgacttgcttcttttc

SEQ ID NO: 719 - DNA, 21 bp, Homo sapiens
  source 1..21: mol_type = genomic DNA
ctttggctcagaatcttccaa

SEQ ID NO: 720 - DNA, 21 bp, Homo sapiens
  source 1..21: mol_type = genomic DNA
tgtatgaggaccagcagtaaa

SEQ ID NO: 721 - DNA, 20 bp, Homo sapiens
  source 1..20: mol_type = genomic DNA
tcttttccccttgtgcatag

SEQ ID NO: 722 - DNA, 20 bp, Homo sapiens
  source 1..20: mol_type = genomic DNA
gcttagtgtgtgtgatccgt

SEQ ID NO: 723 - DNA, 20 bp, Homo sapiens
  source 1..20: mol_type = genomic DNA
actcacctttcccaagaaga

SEQ ID NO: 724 - DNA, 20 bp, Homo sapiens
  source 1..20: mol_type = genomic DNA
tggtagtgggaagaggttga

SEQ ID NO: 725 - DNA, 20 bp, Homo sapiens
  source 1..20: mol_type = genomic DNA
gcatggagaacaaaagctga

SEQ ID NO: 726 - DNA, 20 bp, Homo sapiens
  source 1..20: mol_type = genomic DNA
tgtgagcaagaaactgaagg

SEQ ID NO: 727 - DNA, 20 bp, Homo sapiens
  source 1..20: mol_type = genomic DNA
agtatcacttgtccagctca

SEQ ID NO: 728 - DNA, 20 bp, Homo sapiens
  source 1..20: mol_type = genomic DNA
cacaggactaggtaggcttt

SEQ ID NO: 729 - DNA, 21 bp, Homo sapiens
  source 1..21: mol_type = genomic DNA
gtgttaacagctttcccttca

SEQ ID NO: 730 - DNA, 23 bp, Homo sapiens
  source 1..23: mol_type = genomic DNA
tcatgtacagaaagaattagcct

SEQ ID NO: 731 - DNA, 20 bp, Homo sapiens
  source 1..20: mol_type = genomic DNA
agaggccaagtgaccaaata

SEQ ID NO: 732 - DNA, 21 bp, Homo sapiens
  source 1..21: mol_type = genomic DNA
aagccagtaattcatcttccc

SEQ ID NO: 733 - DNA, 21 bp, Homo sapiens
  source 1..21: mol_type = genomic DNA
ccatgacataacacatcacca

SEQ ID NO: 734 - DNA, 20 bp, Homo sapiens
  source 1..20: mol_type = genomic DNA
atagatttcctcctgggctg

SEQ ID NO: 735 - DNA, 20 bp, Homo sapiens
  source 1..20: mol_type = genomic DNA
ccacctctgtacccactatc

SEQ ID NO: 736 - DNA, 20 bp, Homo sapiens
  source 1..20: mol_type = genomic DNA
ttccctggaagatagccaat

SEQ ID NO: 737 - DNA, 20 bp, Homo sapiens
  source 1..20: mol_type = genomic DNA
tggacacgtaaaagaaggtg

SEQ ID NO: 738 - DNA, 20 bp, Homo sapiens
  source 1..20: mol_type = genomic DNA
ctgagaaccttgtccaactg

SEQ ID NO: 739 - DNA, 20 bp, Homo sapiens
  source 1..20: mol_type = genomic DNA
tttcgctagtctttgcactt

SEQ ID NO: 740 - DNA, 20 bp, Homo sapiens
  source 1..20: mol_type = genomic DNA
gcggcaataattgtcacaaa

SEQ ID NO: 741 - DNA, 20 bp, Homo sapiens
  source 1..20: mol_type = genomic DNA
cagaaatgtgtcaggctaca

SEQ ID NO: 742 - DNA, 20 bp, Homo sapiens
  source 1..20: mol_type = genomic DNA
aactcttcattttgacgggg

SEQ ID NO: 743 - DNA, 20 bp, Homo sapiens
  source 1..20: mol_type = genomic DNA
tgggttgtgctgttgtttag

SEQ ID NO: 744 - DNA, 19 bp, Homo sapiens
  source 1..19: mol_type = genomic DNA
gctcagctcctttcatctg

SEQ ID NO: 745 - DNA, 20 bp, Homo sapiens
  source 1..20: mol_type = genomic DNA
aggacattcagcctatttgc

SEQ ID NO: 746 - DNA, 20 bp, Homo sapiens
  source 1..20: mol_type = genomic DNA
acacagtatcaaggtcaaca

SEQ ID NO: 747 - DNA, 20 bp, Homo sapiens
  source 1..20: mol_type = genomic DNA
gcagaaccacagtctatgag

SEQ ID NO: 748 - DNA, 21 bp, Homo sapiens
  source 1..21: mol_type = genomic DNA
aatgctccaagttattccaga

SEQ ID NO: 749 - DNA, 20 bp, Homo sapiens
  source 1..20: mol_type = genomic DNA
aagagagaagcgacaaaacc

SEQ ID NO: 750 - DNA, 20 bp, Homo sapiens
  source 1..20: mol_type = genomic DNA
aatgagaaggaattgggtgc

SEQ ID NO: 751 - DNA, 20 bp, Homo sapiens
  source 1..20: mol_type = genomic DNA
aatgaagtgttagggccatc

SEQ ID NO: 752 - DNA, 21 bp, Homo sapiens
  source 1..21: mol_type = genomic DNA
gctcatcacagtttaaggagt

SEQ ID NO: 753 - DNA, 20 bp, Homo sapiens
  source 1..20: mol_type = genomic DNA
atgtggaagcaagagaaagg

SEQ ID NO: 754 - DNA, 20 bp, Homo sapiens
  source 1..20: mol_type = genomic DNA
tgaaaggtgaagtggctttt

SEQ ID NO: 755 - DNA, 20 bp, Homo sapiens
  source 1..20: mol_type = genomic DNA
gtaagtaaggggtcctagct

SEQ ID NO: 756 - DNA, 20 bp, Homo sapiens
  source 1..20: mol_type = genomic DNA
tgtgacttccatgaaactgg

SEQ ID NO: 757 - DNA, 20 bp, Homo sapiens
  source 1..20: mol_type = genomic DNA
gctgacaaactaaccttcca

SEQ ID NO: 758 - DNA, 20 bp, Homo sapiens
  source 1..20: mol_type = genomic DNA
aaaacctcccaaaacagact

SEQ ID NO: 759 - DNA, 20 bp, Homo sapiens
  source 1..20: mol_type = genomic DNA
agtttagtggccacgtgaaa

SEQ ID NO: 760 - DNA, 20 bp, Homo sapiens
  source 1..20: mol_type = genomic DNA
ggcagaagtttcaattccct

SEQ ID NO: 761 - DNA, 20 bp, Homo sapiens
  source 1..20: mol_type = genomic DNA
aaagcctctgtttgcacttt

SEQ ID NO: 762 - DNA, 20 bp, Homo sapiens
  source 1..20: mol_type = genomic DNA
tcagtcagcttcttgagtca

SEQ ID NO: 763 - DNA, 20 bp, Homo sapiens
  source 1..20: mol_type = genomic DNA
tgtttcatttgggtcatgga

SEQ ID NO: 764 - DNA, 21 bp, Homo sapiens
  source 1..21: mol_type = genomic DNA
tacagcactaggatcactctg

SEQ ID NO: 765 - DNA, 20 bp, Homo sapiens
  source 1..20: mol_type = genomic DNA
atgcatgtttcttgcaaagg

SEQ ID NO: 766 - DNA, 20 bp, Homo sapiens
  source 1..20: mol_type = genomic DNA
gtaggattcagggcatttca

SEQ ID NO: 767 - DNA, 19 bp, Homo sapiens
  source 1..19: mol_type = genomic DNA
aactggaactgagcgtgag

SEQ ID NO: 768 - DNA, 20 bp, Homo sapiens
  source 1..20: mol_type = genomic DNA
tgtatgcagttacctccaga

SEQ ID NO: 769 - DNA, 20 bp, Homo sapiens
  source 1..20: mol_type = genomic DNA
ggatgtataccagacccctt

SEQ ID NO: 770 - DNA, 20 bp, Homo sapiens
  source 1..20: mol_type = genomic DNA
cgaaagatgttagcacctca

SEQ ID NO: 771 - DNA, 20 bp, Homo sapiens
  source 1..20: mol_type = genomic DNA
aattggctttgcagtgtttc

SEQ ID NO: 772 - DNA, 20 bp, Homo sapiens
  source 1..20: mol_type = genomic DNA
gcttgctggtaggaggtata

SEQ ID NO: 773 - DNA, 20 bp, Homo sapiens
  source 1..20: mol_type = genomic DNA
ctggaaacggaaggaagttg

SEQ ID NO: 774 - DNA, 20 bp, Homo sapiens
  source 1..20: mol_type = genomic DNA
ctgtgttcagtaagtggctg

SEQ ID NO: 775 - DNA, 20 bp, Homo sapiens
  source 1..20: mol_type = genomic DNA
gacagtgaagtgtgatcgtt

SEQ ID NO: 776 - DNA, 20 bp, Homo sapiens
  source 1..20: mol_type = genomic DNA
tggtgatgctgttttggaaa

SEQ ID NO: 777 - DNA, 22 bp, Homo sapiens
  source 1..22: mol_type = genomic DNA
ttctttcaggcagaagaaatga

SEQ ID NO: 778 - DNA, 24 bp, Homo sapiens
  source 1..24: mol_type = genomic DNA
aagttccattactgtattgaaaat

SEQ ID NO: 779 - DNA, 20 bp, Homo sapiens
  source 1..20: mol_type = genomic DNA
ggacgtacgtgcttatttca

SEQ ID NO: 780 - DNA, 21 bp, Homo sapiens
  source 1..21: mol_type = genomic DNA
cagcctgatattcccattgag

SEQ ID NO: 781 - DNA, 20 bp, Homo sapiens
  source 1..20: mol_type = genomic DNA
tcatgaggctgagtgagtat

SEQ ID NO: 782 - DNA, 20 bp, Homo sapiens
  source 1..20: mol_type = genomic DNA
aaagctctcctatctccagt

SEQ ID NO: 783 - DNA, 21 bp, Homo sapiens
  source 1..21: mol_type = genomic DNA
acaaagagtctggactatcct

SEQ ID NO: 784 - DNA, 21 bp, Homo sapiens
  source 1..21: mol_type = genomic DNA
tgcctaaaaatacccaaagct

SEQ ID NO: 785 - DNA, 20 bp, Homo sapiens
  source 1..20: mol_type = genomic DNA
ccaagacactcactccaaag

SEQ ID NO: 786 - DNA, 20 bp, Homo sapiens
  source 1..20: mol_type = genomic DNA
ccaggaaaaggagcagtttt

SEQ ID NO: 787 - DNA, 20 bp, Homo sapiens
  source 1..20: mol_type = genomic DNA
gttcaactctttctgcgaac

SEQ ID NO: 788 - DNA, 20 bp, Homo sapiens
  source 1..20: mol_type = genomic DNA
ccacttcttctgtttccaac

SEQ ID NO: 789 - DNA, 19 bp, Homo sapiens
  source 1..19: mol_type = genomic DNA
gggaagggcatgctaatca

SEQ ID NO: 790 - DNA, 20 bp, Homo sapiens
  source 1..20: mol_type = genomic DNA
tgttcaatcacctctccatc

SEQ ID NO: 791 - DNA, 20 bp, Homo sapiens
  source 1..20: mol_type = genomic DNA
agaggagaggctaagctttg

SEQ ID NO: 792 - DNA, 20 bp, Homo sapiens
  source 1..20: mol_type = genomic DNA
acaagagaggaagctgtcag

SEQ ID NO: 793 - DNA, 20 bp, Homo sapiens
  source 1..20: mol_type = genomic DNA
agcccctttctccttattct

SEQ ID NO: 794 - DNA, 20 bp, Homo sapiens
  source 1..20: mol_type = genomic DNA
agggaagcaggattttaacg

SEQ ID NO: 795 - DNA, 20 bp, Homo sapiens
  source 1..20: mol_type = genomic DNA
aagtttcacaatacccaggt

SEQ ID NO: 796 - DNA, 20 bp, Homo sapiens
  source 1..20: mol_type = genomic DNA
tcgcagaatggacaagtact

SEQ ID NO: 797 - DNA, 20 bp, Homo sapiens
  source 1..20: mol_type = genomic DNA
ggctcccagattttgatcat

SEQ ID NO: 798 - DNA, 20 bp, Homo sapiens
  source 1..20: mol_type = genomic DNA
cctagaactgcaaaacacct

SEQ ID NO: 799 - DNA, 21 bp, Homo sapiens
  source 1..21: mol_type = genomic DNA
ttccattattttctcaccggc

SEQ ID NO: 800 - DNA, 20 bp, Homo sapiens
  source 1..20: mol_type = genomic DNA
cagtccaacaaagaggtcac

SEQ ID NO: 801 - DNA, 20 bp, Homo sapiens
  source 1..20: mol_type = genomic DNA
ttgtgtgtgttgaagcctag

SEQ ID NO: 802 - DNA, 20 bp, Homo sapiens
  source 1..20: mol_type = genomic DNA
agtgggggtaggaagaaaaa

SEQ ID NO: 803 - DNA, 20 bp, Homo sapiens
  source 1..20: mol_type = genomic DNA
gttccaacaatgtaaggcac

SEQ ID NO: 804 - DNA, 20 bp, Homo sapiens
  source 1..20: mol_type = genomic DNA
ggaaccctctatggtcaaag

SEQ ID NO: 805 - DNA, 20 bp, Homo sapiens
  source 1..20: mol_type = genomic DNA
attgctgtgtagttccttga

SEQ ID NO: 806 - DNA, 20 bp, Homo sapiens
  source 1..20: mol_type = genomic DNA
tttcttgccaccattctgac

SEQ ID NO: 807 - DNA, 20 bp, Homo sapiens
  source 1..20: mol_type = genomic DNA
cacacgttctaaccaagtgc

SEQ ID NO: 808 - DNA, 21 bp, Homo sapiens
  source 1..21: mol_type = genomic DNA
tagccacatcttaacagacct

SEQ ID NO: 809 - DNA, 20 bp, Homo sapiens
  source 1..20: mol_type = genomic DNA
attcctgagggtgacatgaa

SEQ ID NO: 810 - DNA, 20 bp, Homo sapiens
  source 1..20: mol_type = genomic DNA
cctgccccatcaacttaaaa

SEQ ID NO: 811 - DNA, 18 bp, Homo sapiens
  source 1..18: mol_type = genomic DNA
ctgggtgcagaggatctc

SEQ ID NO: 812 - DNA, 22 bp, Homo sapiens
  source 1..22: mol_type = genomic DNA
ttgagttgaactttgctttaga

SEQ ID NO: 813 - DNA, 20 bp, Homo sapiens
  source 1..20: mol_type = genomic DNA
gaactaggagacactgggtt

SEQ ID NO: 814 - DNA, 21 bp, Homo sapiens
  source 1..21: mol_type = genomic DNA
caagaatagctaactggtgct

SEQ ID NO: 815 - DNA, 21 bp, Homo sapiens
  source 1..21: mol_type = genomic DNA
agttacacactgaatcatggg

SEQ ID NO: 816 - DNA, 20 bp, Homo sapiens
  source 1..20: mol_type = genomic DNA
cccatgtggcttcactaata

SEQ ID NO: 817 - DNA, 20 bp, Homo sapiens
  source 1..20: mol_type = genomic DNA
gattgtggtcacgtggagag

SEQ ID NO: 818 - DNA, 20 bp, Homo sapiens
  source 1..20: mol_type = genomic DNA
cagatccaggtattcggaga

SEQ ID NO: 819 - DNA, 20 bp, Homo sapiens
  source 1..20: mol_type = genomic DNA
acaacaacaaccattaccca

SEQ ID NO: 820 - DNA, 20 bp, Homo sapiens
  source 1..20: mol_type = genomic DNA
tggccatagtactgcttgta

SEQ ID NO: 821 - DNA, 20 bp, Homo sapiens
  source 1..20: mol_type = genomic DNA
tgtctcactgttgggaactt

SEQ ID NO: 822 - DNA, 20 bp, Homo sapiens
  source 1..20: mol_type = genomic DNA
tttgtctgtatcctatgccc

SEQ ID NO: 823 - DNA, 20 bp, Homo sapiens
  source 1..20: mol_type = genomic DNA
gctgacaaaattggatccca

SEQ ID NO: 824 - DNA, 20 bp, Homo sapiens
  source 1..20: mol_type = genomic DNA
aaaatcctcctgagtcctct

SEQ ID NO: 825 - DNA, 20 bp, Homo sapiens
  source 1..20: mol_type = genomic DNA
ttcactgggctcttcagcta

SEQ ID NO: 826 - DNA, 20 bp, Homo sapiens
  source 1..20: mol_type = genomic DNA
aaagggcaggagttaggtaa

SEQ ID NO: 827 - DNA, 20 bp, Homo sapiens
  source 1..20: mol_type = genomic DNA
aggcataagaaaccaggttg

SEQ ID NO: 828 - DNA, 20 bp, Homo sapiens
  source 1..20: mol_type = genomic DNA
gtagttcggtccaatgtcag

SEQ ID NO: 829 - DNA, 20 bp, Homo sapiens
  source 1..20: mol_type = genomic DNA
gatggtcacaattgcaggtt

SEQ ID NO: 830 - DNA, 20 bp, Homo sapiens
  source 1..20: mol_type = genomic DNA
gccaaagatctcaattgcca

SEQ ID NO: 831 - DNA, 20 bp, Homo sapiens
  source 1..20: mol_type = genomic DNA
gaccaagactgtctctcctt

SEQ ID NO: 832 - DNA, 22 bp, Homo sapiens
  source 1..22: mol_type = genomic DNA
taatggtcaaatccctctcaaa

SEQ ID NO: 833 - DNA, 20 bp, Homo sapiens
  source 1..20: mol_type = genomic DNA
catgtaggctgaagactcct

SEQ ID NO: 834 - DNA, 20 bp, Homo sapiens
  source 1..20: mol_type = genomic DNA
tttctctccaaactggttgc

SEQ ID NO: 835 - DNA, 21 bp, Homo sapiens
  source 1..21: mol_type = genomic DNA
tacaggcaagaaatagtgtct

SEQ ID NO: 836 - DNA, 20 bp, Homo sapiens
  source 1..20: mol_type = genomic DNA
ttcagcaagaatggggattc

SEQ ID NO: 837 - DNA, 20 bp, Homo sapiens
  source 1..20: mol_type = genomic DNA
caaagagagagccatcacag

SEQ ID NO: 838 - DNA, 21 bp, Homo sapiens
  source 1..21: mol_type = genomic DNA
tgagaacactgctatttctgc

SEQ ID NO: 839 - DNA, 18 bp, Homo sapiens
  source 1..18: mol_type = genomic DNA
gcatggtcaggacattgg

SEQ ID NO: 840 - DNA, 20 bp, Homo sapiens
  source 1..20: mol_type = genomic DNA
gattgaatcaggagggaagc

SEQ ID NO: 841 - DNA, 23 bp, Homo sapiens
  source 1..23: mol_type = genomic DNA
agcttaaatgatgaagtgctttc

SEQ ID NO: 842 - DNA, 20 bp, Homo sapiens
  source 1..20: mol_type = genomic DNA
ttctcctacgtatcttggca

SEQ ID NO: 843 - DNA, 20 bp, Homo sapiens
  source 1..20: mol_type = genomic DNA
acctgggacataaccttgat

SEQ ID NO: 844 - DNA, 20 bp, Homo sapiens
  source 1..20: mol_type = genomic DNA
ccattttcctactgcgtgtc

SEQ ID NO: 845 - DNA, 20 bp, Homo sapiens
  source 1..20: mol_type = genomic DNA
gaacataccaaacccactgg

SEQ ID NO: 846 - DNA, 20 bp, Homo sapiens
  source 1..20: mol_type = genomic DNA
acccaatgatgtacagttcc

SEQ ID NO: 847 - DNA, 22 bp, Homo sapiens
  source 1..22: mol_type = genomic DNA
acctattcgacttgaaactcag

SEQ ID NO: 848 - DNA, 20 bp, Homo sapiens
  source 1..20: mol_type = genomic DNA
atttctgcacaactgttcca

SEQ ID NO: 849 - DNA, 20 bp, Homo sapiens
  source 1..20: mol_type = genomic DNA
gctgtaatgtgactaaccct

SEQ ID NO: 850 - DNA, 20 bp, Homo sapiens
  source 1..20: mol_type = genomic DNA
tttcccgaggttcacagata

SEQ ID NO: 851 - DNA, 20 bp, Homo sapiens
  source 1..20: mol_type = genomic DNA
gaacttgtgtgacccaaaac

SEQ ID NO: 852 - DNA, 20 bp, Homo sapiens
  source 1..20: mol_type = genomic DNA
cattgcactgtgatgtcatg

SEQ ID NO: 853 - DNA, 20 bp, Homo sapiens
  source 1..20: mol_type = genomic DNA
gcactggaaattgacatcac

SEQ ID NO: 854 - DNA, 20 bp, Homo sapiens
  source 1..20: mol_type = genomic DNA
gggagaggctgaaagaagaa

SEQ ID NO: 855 - DNA, 20 bp, Homo sapiens
  source 1..20: mol_type = genomic DNA
tgtatcacttcctcatgcca

SEQ ID NO: 856 - DNA, 20 bp, Homo sapiens
  source 1..20: mol_type = genomic DNA
ccaagagtttcctgtttcca

SEQ ID NO: 857 - DNA, 22 bp, Homo sapiens
  source 1..22: mol_type = genomic DNA
atgacacatacatccatttaca

SEQ ID NO: 858 - DNA, 20 bp, Homo sapiens
  source 1..20: mol_type = genomic DNA
ctcaaactgcccagtgattt

SEQ ID NO: 859 - DNA, 20 bp, Homo sapiens
  source 1..20: mol_type = genomic DNA
tcctagcttgccaaagaaat

SEQ ID NO: 860 - DNA, 20 bp, Homo sapiens
  source 1..20: mol_type = genomic DNA
cctcctctccaggcatttta

SEQ ID NO: 861 - DNA, 20 bp, Homo sapiens
  source 1..20: mol_type = genomic DNA
aacagagtagcacagagagt

SEQ ID NO: 862 - DNA, 20 bp, Homo sapiens
  source 1..20: mol_type = genomic DNA
ttcagagagacagacagcat

SEQ ID NO: 863 - DNA, 20 bp, Homo sapiens
  source 1..20: mol_type = genomic DNA
agaggaaaatcacaagcagt

SEQ ID NO: 864 - DNA, 20 bp, Homo sapiens
  source 1..20: mol_type = genomic DNA
tttgaaaacccaacagacct

SEQ ID NO: 865 - DNA, 20 bp, Homo sapiens
  source 1..20: mol_type = genomic DNA
aatccacacaccaacagagg

SEQ ID NO: 866 - DNA, 21 bp, Homo sapiens
  source 1..21: mol_type = genomic DNA
tgttcacatctgttggtttgc

SEQ ID NO: 867 - DNA, 21 bp, Homo sapiens
  source 1..21: mol_type = genomic DNA
gttactcggtgggtgatattt

SEQ ID NO: 868 - DNA, 21 bp, Homo sapiens
  source 1..21: mol_type = genomic DNA
aagaaacaccagcatcagttc

SEQ ID NO: 869 - DNA, 21 bp, Homo sapiens
  source 1..21: mol_type = genomic DNA
aggtttagaggtgagtgaaca

SEQ ID NO: 870 - DNA, 22 bp, Homo sapiens
  source 1..22: mol_type = genomic DNA
agaaacttcactgtcttccact

SEQ ID NO: 871 - DNA, 21 bp, Homo sapiens
  source 1..21: mol_type = genomic DNA
tgtgatggacattggtacctg

SEQ ID NO: 872 - DNA, 21 bp, Homo sapiens
  source 1..21: mol_type = genomic DNA
atatcatctgcctgtcccaac

SEQ ID NO: 873 - DNA, 21 bp, Homo sapiens
  source 1..21: mol_type = genomic DNA
gagtgctctgtgtttgtttca

SEQ ID NO: 874 - DNA, 22 bp, Homo sapiens
  source 1..22: mol_type = genomic DNA
tcagtggtgagctcttgaatat

SEQ ID NO: 875 - DNA, 21 bp, Homo sapiens
  source 1..21: mol_type = genomic DNA
actctctcttcacacatgcaa

SEQ ID NO: 876 - DNA, 21 bp, Homo sapiens
  source 1..21: mol_type = genomic DNA
gtgttgaagtcagtaaagcct

SEQ ID NO: 877 - DNA, 21 bp, Homo sapiens
  source 1..21: mol_type = genomic DNA
tgctttcacatggcactagat

SEQ ID NO: 878 - DNA, 21 bp, Homo sapiens
  source 1..21: mol_type = genomic DNA
ggagagagaaatcccaactga

SEQ ID NO: 879 - DNA, 21 bp, Homo sapiens
  source 1..21: mol_type = genomic DNA
gggagatgtcaacactaggtc

SEQ ID NO: 880 - DNA, 20 bp, Homo sapiens
  source 1..20: mol_type = genomic DNA
atatgacatggtggctctcc

SEQ ID NO: 881 - DNA, 21 bp, Homo sapiens
  source 1..21: mol_type = genomic DNA
aacatagagccatgggaggta

SEQ ID NO: 882 - DNA, 21 bp, Homo sapiens
  source 1..21: mol_type = genomic DNA
gatagccttcaaatcatgcct

SEQ ID NO: 883 - DNA, 21 bp, Homo sapiens
  source 1..21: mol_type = genomic DNA
gaaagcgggtgaacaacaata

SEQ ID NO: 884 - DNA, 21 bp, Homo sapiens
  source 1..21: mol_type = genomic DNA
gatagagagcacaaagagcat

SEQ ID NO: 885 - DNA, 21 bp, Homo sapiens
  source 1..21: mol_type = genomic DNA
aacaagaggaataggagccag

SEQ ID NO: 886 - DNA, 21 bp, Homo sapiens
  source 1..21: mol_type = genomic DNA
tgggtgctgatagtaacaaag

SEQ ID NO: 887 - DNA, 21 bp, Homo sapiens
  source 1..21: mol_type = genomic DNA
actattgaactgttggcttcg

SEQ ID NO: 888 - DNA, 21 bp, Homo sapiens
  source 1..21: mol_type = genomic DNA
tccactaaagagcaaccaaac

SEQ ID NO: 889 - DNA, 21 bp, Homo sapiens
  source 1..21: mol_type = genomic DNA
tgaagtggtcagtaacaatgg

SEQ ID NO: 890 - DNA, 21 bp, Homo sapiens
  source 1..21: mol_type = genomic DNA
atttcagagctcctttgtcct

SEQ ID NO: 891 - DNA, 21 bp, Homo sapiens
  source 1..21: mol_type = genomic DNA
ggcaaagaaatctggtgttca

SEQ ID NO: 892 - DNA, 21 bp, Homo sapiens
  source 1..21: mol_type = genomic DNA
ttgctggttgataggcatttg

SEQ ID NO: 893 - DNA, 21 bp, Homo sapiens
  source 1..21: mol_type = genomic DNA
attcccgcaattgtgagattc

SEQ ID NO: 894 - DNA, 22 bp, Homo sapiens
  source 1..22: mol_type = genomic DNA
aaagaggtacagaactcagacc

SEQ ID NO: 895 - DNA, 21 bp, Homo sapiens
  source 1..21: mol_type = genomic DNA
gtcttcatgaacgttgccaat

SEQ ID NO: 896 - DNA, 21 bp, Homo sapiens
  source 1..21: mol_type = genomic DNA
cttctcagggctctttgtgta

SEQ ID NO: 897 - DNA, 21 bp, Homo sapiens
  source 1..21: mol_type = genomic DNA
gcaacagaaaccaagattcct

SEQ ID NO: 898 - DNA, 22 bp, Homo sapiens
  source 1..22: mol_type = genomic DNA
tcattgtctacctcaaagagca

SEQ ID NO: 899 - DNA, 21 bp, Homo sapiens
  source 1..21: mol_type = genomic DNA
ctctgaaggaacaaaggatgg

SEQ ID NO: 900 - DNA, 21 bp, Homo sapiens
  source 1..21: mol_type = genomic DNA
cattagaatgcggtggtttca

SEQ ID NO: 901 - DNA, 21 bp, Homo sapiens
  source 1..21: mol_type = genomic DNA
gatgtctgggctgaggtttaa

SEQ ID NO: 902 - DNA, 21 bp, Homo sapiens
  source 1..21: mol_type = genomic DNA
ttcctcttgaagatgcactgg

SEQ ID NO: 903 - DNA, 21 bp, Homo sapiens
  source 1..21: mol_type = genomic DNA
ccagcatgtgaggaattgaac

SEQ ID NO: 904 - DNA, 21 bp, Homo sapiens
  source 1..21: mol_type = genomic DNA
cccacttagtcatccacacat

SEQ ID NO: 905 - DNA, 21 bp, Homo sapiens
  source 1..21: mol_type = genomic DNA
gtttcacacaccagaagagag

SEQ ID NO: 906 - DNA, 21 bp, Homo sapiens
  source 1..21: mol_type = genomic DNA
ccatacacctgctctgacatt

SEQ ID NO: 907 - DNA, 21 bp, Homo sapiens
  source 1..21: mol_type = genomic DNA
atcagtaacagtcccattgct

SEQ ID NO: 908 - DNA, 21 bp, Homo sapiens
  source 1..21: mol_type = genomic DNA
catgaggcatttgatccatgg

SEQ ID NO: 909 - DNA, 21 bp, Homo sapiens
  source 1..21: mol_type = genomic DNA
accctgtttcactgaacaact

SEQ ID NO: 910 - DNA, 21 bp, Homo sapiens
  source 1..21: mol_type = genomic DNA
ccctgtaatgagagcgttatt

SEQ ID NO: 911 - DNA, 22 bp, Homo sapiens
  source 1..22: mol_type = genomic DNA
gagagaatgggttaaatctgcc

SEQ ID NO: 912 - DNA, 21 bp, Homo sapiens
  source 1..21: mol_type = genomic DNA
ctgcctgacttagccttaaat

SEQ ID NO: 913 - DNA, 21 bp, Homo sapiens
  source 1..21: mol_type = genomic DNA
aaccagaatgttactagccca

SEQ ID NO: 914 - DNA, 21 bp, Homo sapiens
  source 1..21: mol_type = genomic DNA
caatcctgtgtgtttagtgga

SEQ ID NO: 915 - DNA, 20 bp, Homo sapiens
  source 1..20: mol_type = genomic DNA
tgtgggaagcattgactctt

SEQ ID NO: 916 - DNA, 21 bp, Homo sapiens
  source 1..21: mol_type = genomic DNA
tcctgtgagaaatggagcttt

SEQ ID NO: 917 - DNA, 22 bp, Homo sapiens
  source 1..22: mol_type = genomic DNA
gttgccaagcttaaatacctgt

SEQ ID NO: 918 - DNA, 21 bp, Homo sapiens
  source 1..21: mol_type = genomic DNA
ccacaacaacataaacactgc

SEQ ID NO: 919 - DNA, 21 bp, Homo sapiens
  source 1..21: mol_type = genomic DNA
tcttccaggcatattcattgc

SEQ ID NO: 920 - DNA, 21 bp, Homo sapiens
  source 1..21: mol_type = genomic DNA
atccattctctctacttggga

SEQ ID NO: 921 - DNA, 22 bp, Homo sapiens
  source 1..22: mol_type = genomic DNA
ggctagagggtgattataagct

SEQ ID NO: 922 - DNA, 21 bp, Homo sapiens
  source 1..21: mol_type = genomic DNA
tactcatcccgatttcttccc

SEQ ID NO: 923 - DNA, 21 bp, Homo sapiens
  source 1..21: mol_type = genomic DNA
ttctctttctcttctgggcag

SEQ ID NO: 924 - DNA, 21 bp, Homo sapiens
  source 1..21: mol_type = genomic DNA
ttgtgagactcaaggccattt

SEQ ID NO: 925 - DNA, 21 bp, Homo sapiens
  source 1..21: mol_type = genomic DNA
ttggtagagagaggccatttg

SEQ ID NO: 926 - DNA, 21 bp, Homo sapiens
  source 1..21: mol_type = genomic DNA
ggaggaagctcttgaagacat

SEQ ID NO: 927 - DNA, 21 bp, Homo sapiens
  source 1..21: mol_type = genomic DNA
agcatcttccgtttaactcca

SEQ ID NO: 928 - DNA, 20 bp, Homo sapiens
  source 1..20: mol_type = genomic DNA
ctgcctgccaagtatgttct

SEQ ID NO: 929 - DNA, 21 bp, Homo sapiens
  source 1..21: mol_type = genomic DNA
ctactccttgtgtcattggct

SEQ ID NO: 930 - DNA, 21 bp, Homo sapiens
  source 1..21: mol_type = genomic DNA
tgattctgagacacgtgctta

SEQ ID NO: 931 - DNA, 21 bp, Homo sapiens
  source 1..21: mol_type = genomic DNA
cttgaggacctttcatgcttg

SEQ ID NO: 932 - DNA, 21 bp, Homo sapiens
  source 1..21: mol_type = genomic DNA
ttgtgatttcaggtaggaggg

SEQ ID NO: 933 - DNA, 21 bp, Homo sapiens
  source 1..21: mol_type = genomic DNA
ttccctcagagacagtatcct

SEQ ID NO: 934 - DNA, 20 bp, Homo sapiens
  source 1..20: mol_type = genomic DNA
aaaggaggtctggctttgaa

SEQ ID NO: 935 - DNA, 21 bp, Homo sapiens
  source 1..21: mol_type = genomic DNA
gcataaacctggactgtgaaa

SEQ ID NO: 936 - DNA, 20 bp, Homo sapiens
  source 1..20: mol_type = genomic DNA
cactcagcgattctcctcac

SEQ ID NO: 937 - DNA, 21 bp, Homo sapiens
  source 1..21: mol_type = genomic DNA
aaagccagacacagactagtt

SEQ ID NO: 938 - DNA, 20 bp, Homo sapiens
  source 1..20: mol_type = genomic DNA
attcctgggaccacaagcat

SEQ ID NO: 939 - DNA, 20 bp, Homo sapiens
  source 1..20: mol_type = genomic DNA
tattgcctcatgtggttgtg

SEQ ID NO: 940 - DNA, 22 bp, Homo sapiens
  source 1..22: mol_type = genomic DNA
gtgttgacttgaaaggaatcac

SEQ ID NO: 941 - DNA, 21 bp, Homo sapiens
  source 1..21: mol_type = genomic DNA
caggttaggaatgacagtggg

SEQ ID NO: 942 - DNA, 21 bp, Homo sapiens
  source 1..21: mol_type = genomic DNA
ttaggttacccagggacgtta

SEQ ID NO: 943 - DNA, 21 bp, Homo sapiens
  source 1..21: mol_type = genomic DNA
cggtttgctttctgaacaaca

SEQ ID NO: 944 - DNA, 21 bp, Homo sapiens
  source 1..21: mol_type = genomic DNA
catttgggaccctttgaaact

SEQ ID NO: 945 - DNA, 21 bp, Homo sapiens
  source 1..21: mol_type = genomic DNA
ggttatctctgggcaaagttc

SEQ ID NO: 946 - DNA, 21 bp, Homo sapiens
  source 1..21: mol_type = genomic DNA
tagagagcagagaacaaaccc

SEQ ID NO: 947 - DNA, 21 bp, Homo sapiens
  source 1..21: mol_type = genomic DNA
ataagggcatttggagggaaa

SEQ ID NO: 948 - DNA, 21 bp, Homo sapiens
  source 1..21: mol_type = genomic DNA
aatgcacacttagacaccaca

SEQ ID NO: 949 - DNA, 21 bp, Homo sapiens
  source 1..21: mol_type = genomic DNA
ggattgctacccaggagataa

SEQ ID NO: 950 - DNA, 21 bp, Homo sapiens
  source 1..21: mol_type = genomic DNA
agaggttctgtgtatgagtgt

SEQ ID NO: 951 - DNA, 21 bp, Homo sapiens
  source 1..21: mol_type = genomic DNA
tagagaattgtacgctggaca

SEQ ID NO: 952 - DNA, 21 bp, Homo sapiens
  source 1..21: mol_type = genomic DNA
tctggagaaatgcacaagaga

SEQ ID NO: 953 - DNA, 21 bp, Homo sapiens
  source 1..21: mol_type = genomic DNA
tgggttagaacatggtgctta

SEQ ID NO: 954 - DNA, 21 bp, Homo sapiens
  source 1..21: mol_type = genomic DNA
atcgcatcacacccttactat

SEQ ID NO: 955 - DNA, 21 bp, Homo sapiens
  source 1..21: mol_type = genomic DNA
ggaaatttagcttgacatggc

SEQ ID NO: 956 - DNA, 22 bp, Homo sapiens
  source 1..22: mol_type = genomic DNA
tttgtaaatccacagtgcctac

SEQ ID NO: 957 - DNA, 21 bp, Homo sapiens
  source 1..21: mol_type = genomic DNA
ggtactggagagcatagaaga

SEQ ID NO: 958 - DNA, 21 bp, Homo sapiens
  source 1..21: mol_type = genomic DNA
aaacaagctatcttcaggcag

SEQ ID NO: 959 - DNA, 21 bp, Homo sapiens
  source 1..21: mol_type = genomic DNA
cgaacaatcagagactcgact

SEQ ID NO: 960 - DNA, 21 bp, Homo sapiens
  source 1..21: mol_type = genomic DNA
ctggttgacaatctgcaagtt

SEQ ID NO: 961 - DNA, 21 bp, Homo sapiens
  source 1..21: mol_type = genomic DNA
accatccaagtcgtcttcata

SEQ ID NO: 962 - DNA, 21 bp, Homo sapiens
  source 1..21: mol_type = genomic DNA
atagctacgcataccctgtag

SEQ ID NO: 963 - DNA, 21 bp, Homo sapiens
  source 1..21: mol_type = genomic DNA
agcagaagaaacagtaaggca

SEQ ID NO: 964 - DNA, 20 bp, Homo sapiens
  source 1..20: mol_type = genomic DNA
acccagggacctatttgttc

SEQ ID NO: 965 - DNA, 21 bp, Homo sapiens
  source 1..21: mol_type = genomic DNA
caagggctcaggtcttcatta

SEQ ID NO: 966 - DNA, 21 bp, Homo sapiens
  source 1..21: mol_type = genomic DNA
tcactgtgacttggagactaa

SEQ ID NO: 967 - DNA, 21 bp, Homo sapiens
  source 1..21: mol_type = genomic DNA
tgctctgcttcactgtgatta

SEQ ID NO: 968 - DNA, 22 bp, Homo sapiens
  source 1..22: mol_type = genomic DNA
gatgaatgactaatagcccacg

SEQ ID NO: 969 - DNA, 21 bp, Homo sapiens
  source 1..21: mol_type = genomic DNA
ccatgtttagtttggtgctgt

SEQ ID NO: 970 - DNA, 20 bp, Homo sapiens
  source 1..20: mol_type = genomic DNA
agccaagtgaggtgctaaat

SEQ ID NO: 971 - DNA, 21 bp, Homo sapiens
  source 1..21: mol_type = genomic DNA
tcagggagaaatgatgtcacc

SEQ ID NO: 972 - DNA, 21 bp, Homo sapiens
  source 1..21: mol_type = genomic DNA
cagtagctggcaagaatcatc

SEQ ID NO: 973 - DNA, 21 bp, Homo sapiens
  source 1..21: mol_type = genomic DNA
caacactgctagaattcccaa

SEQ ID NO: 974 - DNA, 21 bp, Homo sapiens
  source 1..21: mol_type = genomic DNA
cctgagaagcacctgattgta

SEQ ID NO: 975 - DNA, 20 bp, Homo sapiens
  source 1..20: mol_type = genomic DNA
tgttgtcagaaatcccagga

SEQ ID NO: 976 - DNA, 21 bp, Homo sapiens
  source 1..21: mol_type = genomic DNA
aactggagccatataacgatg

SEQ ID NO: 977 - DNA, 21 bp, Homo sapiens
  source 1..21: mol_type = genomic DNA
gaaatggtgccctattgttga

SEQ ID NO: 978 - DNA, 22 bp, Homo sapiens
  source 1..22: mol_type = genomic DNA
tcttacatgcagtcatactcct

SEQ ID NO: 979 - DNA, 22 bp, Homo sapiens
  source 1..22: mol_type = genomic DNA
gtccctcagtaacaccatctta

SEQ ID NO: 980 - DNA, 21 bp, Homo sapiens
  source 1..21: mol_type = genomic DNA
gaagcaagaggatcaggcaat

SEQ ID NO: 981 - DNA, 21 bp, Homo sapiens
  source 1..21: mol_type = genomic DNA
agtgtttcagaggcttgaaag

SEQ ID NO: 982 - DNA, 21 bp, Homo sapiens
  source 1..21: mol_type = genomic DNA
atccggcatcctttaaactct

SEQ ID NO: 983 - DNA, 21 bp, Homo sapiens
  source 1..21: mol_type = genomic DNA
aggctaggaagaaatgggaaa

SEQ ID NO: 984 - DNA, 21 bp, Homo sapiens
  source 1..21: mol_type = genomic DNA
acacatatgctctgtctctca

SEQ ID NO: 985 - DNA, 21 bp, Homo sapiens
  source 1..21: mol_type = genomic DNA
agttagttatcacctcgtccc

SEQ ID NO: 986 - DNA, 22 bp, Homo sapiens
  source 1..22: mol_type = genomic DNA
tgtgtatttccctctagttgca

SEQ ID NO: 987 - DNA, 21 bp, Homo sapiens
  source 1..21: mol_type = genomic DNA
agcctctttctacatcgttcg

SEQ ID NO: 988 - DNA, 21 bp, Homo sapiens
  source 1..21: mol_type = genomic DNA
ttacctgtgcagaagagtgac

SEQ ID NO: 989 - DNA, 21 bp, Homo sapiens
  source 1..21: mol_type = genomic DNA
tcttgtgttctagcgtgtttg

SEQ ID NO: 990 - DNA, 21 bp, Homo sapiens
  source 1..21: mol_type = genomic DNA
tgtggttagtcagaaatgtgg

SEQ ID NO: 991 - DNA, 21 bp, Homo sapiens
  source 1..21: mol_type = genomic DNA
gggtcctgatgagtctttgtc

SEQ ID NO: 992 - DNA, 21 bp, Homo sapiens
  source 1..21: mol_type = genomic DNA
tggtgcctttgtttattcagc

SEQ ID NO: 993 - DNA, 21 bp, Homo sapiens
  source 1..21: mol_type = genomic DNA
tgttatgtgccagggtttaac

SEQ ID NO: 994 - DNA, 21 bp, Homo sapiens
  source 1..21: mol_type = genomic DNA
attggttccagatacagtcga

SEQ ID NO: 995 - DNA, 21 bp, Homo sapiens
  source 1..21: mol_type = genomic DNA
ggaaggaagtacagcatggat

SEQ ID NO: 996 - DNA, 21 bp, Homo sapiens
  source 1..21: mol_type = genomic DNA
ccttattgaagctgaccatgc

SEQ ID NO: 997 - DNA, 21 bp, Homo sapiens
  source 1..21: mol_type = genomic DNA
cagtgggaaatgtgcttacat

SEQ ID NO: 998 - DNA, 21 bp, Homo sapiens
  source 1..21: mol_type = genomic DNA
aaagggcctatattcaccaga

SEQ ID NO: 999 - DNA, 22 bp, Homo sapiens
  source 1..22: mol_type = genomic DNA
agagccatttaagactctctgt

SEQ ID NO: 1000 - DNA, 21 bp, Homo sapiens
  source 1..21: mol_type = genomic DNA
taccttgttctctgcctcaat

SEQ ID NO: 1001 - DNA, 21 bp, Homo sapiens
  source 1..21: mol_type = genomic DNA
tttagaaggatgtggacaggg

SEQ ID NO: 1002 - DNA, 20 bp, Homo sapiens
  source 1..20: mol_type = genomic DNA
agcaggacatggacttcaaa

SEQ ID NO: 1003 - DNA, 21 bp, Homo sapiens
  source 1..21: mol_type = genomic DNA
gcggctcttgtttctgaaatc

SEQ ID NO: 1004 - DNA, 21 bp, Homo sapiens
  source 1..21: mol_type = genomic DNA
acaggtaggagttcagagaca

SEQ ID NO: 1005 - DNA, 22 bp, Homo sapiens
  source 1..22: mol_type = genomic DNA
tttcctattctgctcttctgct

SEQ ID NO: 1006 - DNA, 21 bp, Homo sapiens
  source 1..21: mol_type = genomic DNA
aaatgctgctcagggttagag

SEQ ID NO: 1007 - DNA, 21 bp, Homo sapiens
  source 1..21: mol_type = genomic DNA
caactttactctgcacagctc

SEQ ID NO: 1008 - DNA, 22 bp, Homo sapiens
  source 1..22: mol_type = genomic DNA
cagtgccactacaaagaaatca

SEQ ID NO: 1009 - DNA, 21 bp, Homo sapiens
  source 1..21: mol_type = genomic DNA
agaagcagaggttggatatgg

SEQ ID NO: 1010 - DNA, 21 bp, Homo sapiens
  source 1..21: mol_type = genomic DNA
ccacaatcccatagtcaccat

SEQ ID NO: 1011 - DNA, 21 bp, Homo sapiens
  source 1..21: mol_type = genomic DNA
gctggttcttgttgctgataa

SEQ ID NO: 1012 - DNA, 21 bp, Homo sapiens
  source 1..21: mol_type = genomic DNA
tccctcacgacttatgtttga

SEQ ID NO: 1013 - DNA, 21 bp, Homo sapiens
  source 1..21: mol_type = genomic DNA
ctaccttctccagtgcactat

SEQ ID NO: 1014 - DNA, 21 bp, Homo sapiens
  source 1..21: mol_type = genomic DNA
ggacctctctttgaaatggac

SEQ ID NO: 1015 - DNA, 21 bp, Homo sapiens
  source 1..21: mol_type = genomic DNA
tgggttgtgtttctctgactt

SEQ ID NO: 1016 - DNA, 21 bp, Homo sapiens
  source 1..21: mol_type = genomic DNA
tacaagcctcctttaaccctt

SEQ ID NO: 1017 - DNA, 21 bp, Homo sapiens
  source 1..21: mol_type = genomic DNA
aaagggtttgatacagttggg

SEQ ID NO: 1018 - DNA, 22 bp, Homo sapiens
  source 1..22: mol_type = genomic DNA
aggtattggagagcaagaaaga

SEQ ID NO: 1019 - DNA, 21 bp, Homo sapiens
  source 1..21: mol_type = genomic DNA
gcaaactggagctaaagtcat

SEQ ID NO: 1020 - DNA, 21 bp, Homo sapiens
  source 1..21: mol_type = genomic DNA
ttggttgctagctctcaaatg

SEQ ID NO: 1021 - DNA, 21 bp, Homo sapiens
  source 1..21: mol_type = genomic DNA
ttcaatgcccttacttctcct

SEQ ID NO: 1022 - DNA, 20 bp, Homo sapiens
  source 1..20: mol_type = genomic DNA
gcttgaggcgcatatgattg

SEQ ID NO: 1023 - DNA, 20 bp, Homo sapiens
  source 1..20: mol_type = genomic DNA
catatggtgcttgttctggg

SEQ ID NO: 1024 - DNA, 21 bp, Homo sapiens
  source 1..21: mol_type = genomic DNA
caaactcaccacccttcattc

SEQ ID NO: 1025 - DNA, 21 bp, Homo sapiens
  source 1..21: mol_type = genomic DNA
ccttagccctgcaaataacac

SEQ ID NO: 1026 - DNA, 20 bp, Homo sapiens
  source 1..20: mol_type = genomic DNA
tcacagatacggacaagctc

SEQ ID NO: 1027 - DNA, 21 bp, Homo sapiens
  source 1..21: mol_type = genomic DNA
gccacaggtatcaatcacttc

SEQ ID NO: 1028 - DNA, 21 bp, Homo sapiens
  source 1..21: mol_type = genomic DNA
gcttctgtggcactaatcaag

SEQ ID NO: 1029 - DNA, 22 bp, Homo sapiens
  source 1..22: mol_type = genomic DNA
gccttattgacttactggactg

SEQ ID NO: 1030 - DNA, 21 bp, Homo sapiens
  source 1..21: mol_type = genomic DNA
gtcagggattagaggcagaac

SEQ ID NO: 1031 - DNA, 22 bp, Homo sapiens
  source 1..22: mol_type = genomic DNA
caatcacttggtcagatagtgt

SEQ ID NO: 1032 - DNA, 22 bp, Homo sapiens
  source 1..22: mol_type = genomic DNA
agtggagaggttgagtatagtg

SEQ ID NO: 1033 - DNA, 21 bp, Homo sapiens
  source 1..21: mol_type = genomic DNA
tgagaagggaggaagaatgtg

SEQ ID NO: 1034 - DNA, 21 bp, Homo sapiens
  source 1..21: mol_type = genomic DNA
aaggtcaaactctccattcca

SEQ ID NO: 1035 - DNA, 21 bp, Homo sapiens
  source 1..21: mol_type = genomic DNA
ggagatgtctttgccctgatt

SEQ ID NO: 1036 - DNA, 21 bp, Homo sapiens
  source 1..21: mol_type = genomic DNA
ggtcctcgtttgtccttaaga

SEQ ID NO: 1037 - DNA, 21 bp, Homo sapiens
  source 1..21: mol_type = genomic DNA
agtattgctttgagggctcta

SEQ ID NO: 1038 - DNA, 22 bp, Homo sapiens
  source 1..22: mol_type = genomic DNA
agctatcatgtaagtcactccc

SEQ ID NO: 1039 - DNA, 21 bp, Homo sapiens
  source 1..21: mol_type = genomic DNA
aggaaattcagtacctcagct

SEQ ID NO: 1040 - DNA, 22 bp, Homo sapiens
  source 1..22: mol_type = genomic DNA
caaccttctcattgttgaagct

SEQ ID NO: 1041 - DNA, 20 bp, Homo sapiens
  source 1..20: mol_type = genomic DNA
ggtgactttgctttcccaag

SEQ ID NO: 1042 - DNA, 20 bp, Homo sapiens
  source 1..20: mol_type = genomic DNA
gctgacaaacggagggagag

SEQ ID NO: 1043 - DNA, 21 bp, Homo sapiens
  source 1..21: mol_type = genomic DNA
tgttcttcatcaggcacaatg

SEQ ID NO: 1044 - DNA, 21 bp, Homo sapiens
  source 1..21: mol_type = genomic DNA
accatttgtgtgatccagaac

SEQ ID NO: 1045 - DNA, 20 bp, Homo sapiens
  source 1..20: mol_type = genomic DNA
cttgtcttgagtgcggtaca

SEQ ID NO: 1046 - DNA, 22 bp, Homo sapiens
  source 1..22: mol_type = genomic DNA
gcctctcagtttcctcttatag

SEQ ID NO: 1047 - DNA, 24 bp, Homo sapiens
  source 1..24: mol_type = genomic DNA
cctagatcagtgcagagaatttag

SEQ ID NO: 1048 - DNA, 22 bp, Homo sapiens
  source 1..22: mol_type = genomic DNA
ctttagtttggaggcctcattc

SEQ ID NO: 1049 - DNA, 21 bp, Homo sapiens
  source 1..21: mol_type = genomic DNA
ctgacatcgatggaattctgg

SEQ ID NO: 1050 - DNA, 21 bp, Homo sapiens
  source 1..21: mol_type = genomic DNA
acactgcacgaatggaagatc

SEQ ID NO: 1051 - DNA, 21 bp, Homo sapiens
  source 1..21: mol_type = genomic DNA
ataaacttggtgctcagtggt

SEQ ID NO: 1052 - DNA, 21 bp, Homo sapiens
  source 1..21: mol_type = genomic DNA
acaagcattacagaattcggc

SEQ ID NO: 1053 - DNA, 24 bp, Homo sapiens
  source 1..24: mol_type = genomic DNA
actgacagattctcacctatatca

SEQ ID NO: 1054 - DNA, 21 bp, Homo sapiens
  source 1..21: mol_type = genomic DNA
ggatcaaagccactctagact

SEQ ID NO: 1055 - DNA, 22 bp, Homo sapiens
  source 1..22: mol_type = genomic DNA
ttgagatggcatcaagttcaag

SEQ ID NO: 1056 - DNA, 22 bp, Homo sapiens
  source 1..22: mol_type = genomic DNA
actggattcatgcgttatcaag

SEQ ID NO: 1057 - DNA, 21 bp, Homo sapiens
  source 1..21: mol_type = genomic DNA
tattcttgtgtggaccctgtg

SEQ ID NO: 1058 - DNA, 22 bp, Homo sapiens
  source 1..22: mol_type = genomic DNA
tgatattgcatgaaagtccctg

SEQ ID NO: 1059 - DNA, 20 bp, Homo sapiens
  source 1..20: mol_type = genomic DNA
tcacacatgaggagtagaca

SEQ ID NO: 1060 - DNA, 20 bp, Homo sapiens
  source 1..20: mol_type = genomic DNA
cacagcaggagacatgagaa

SEQ ID NO: 1061 - DNA, 20 bp, Homo sapiens
  source 1..20: mol_type = genomic DNA
tttcctcctggcttgatcac

SEQ ID NO: 1062 - DNA, 20 bp, Homo sapiens
  source 1..20: mol_type = genomic DNA
caaaggagagaagtgaccca

SEQ ID NO: 1063 - DNA, 20 bp, Homo sapiens
  source 1..20: mol_type = genomic DNA
ctacgagtgaaacagagtgc

SEQ ID NO: 1064 - DNA, 20 bp, Homo sapiens
  source 1..20: mol_type = genomic DNA
agactaaaagcctccaagcc

SEQ ID NO: 1065 - DNA, 20 bp, Homo sapiens
  source 1..20: mol_type = genomic DNA
tagaatatgtcacccagccc

SEQ ID NO: 1066 - DNA, 20 bp, Homo sapiens
  source 1..20: mol_type = genomic DNA
acagaatcatcccatagcca

SEQ ID NO: 1067 - DNA, 21 bp, Homo sapiens
  source 1..21: mol_type = genomic DNA
cgccattctgtgcttaatttg

SEQ ID NO: 1068 - DNA, 21 bp, Homo sapiens
  source 1..21: mol_type = genomic DNA
gtgaagcaagagaaagcaaga

SEQ ID NO: 1069 - DNA, 20 bp, Homo sapiens
  source 1..20: mol_type = genomic DNA
tgattcggctgcaggttatt

SEQ ID NO: 1070 - DNA, 20 bp, Homo sapiens
  source 1..20: mol_type = genomic DNA
ctggcttcaaatgcatctga

SEQ ID NO: 1071 - DNA, 20 bp, Homo sapiens
  source 1..20: mol_type = genomic DNA
actgggaaattggaattcgc

SEQ ID NO: 1072 - DNA, 20 bp, Homo sapiens
  source 1..20: mol_type = genomic DNA
ggtaaaactgcctggaaact

SEQ ID NO: 1073 - DNA, 20 bp, Homo sapiens
  source 1..20: mol_type = genomic DNA
agaccacgggctctatctat

SEQ ID NO: 1074 - DNA, 22 bp, Homo sapiens
  source 1..22: mol_type = genomic DNA
catcttgcttattggcttacga

SEQ ID NO: 1075 - DNA, 20 bp, Homo sapiens
  source 1..20: mol_type = genomic DNA
gaggtagaggcagtgtcttg

SEQ ID NO: 1076 - DNA, 20 bp, Homo sapiens
  source 1..20: mol_type = genomic DNA
tagtccttgaactccctggt

SEQ ID NO: 1077 - DNA, 20 bp, Homo sapiens
  source 1..20: mol_type = genomic DNA
ccagcttagcgtctgttttt

SEQ ID NO: 1078 - DNA, 21 bp, Homo sapiens
  source 1..21: mol_type = genomic DNA
gaccacaactatcaagagcac

SEQ ID NO: 1079 - DNA, 20 bp, Homo sapiens
  source 1..20: mol_type = genomic DNA
ccaaagaaaggttgaagccc

SEQ ID NO: 1080 - DNA, 21 bp, Homo sapiens
  source 1..21: mol_type = genomic DNA
aataatgtgcactgtgatggc

SEQ ID NO: 1081 - DNA, 20 bp, Homo sapiens
  source 1..20: mol_type = genomic DNA
tttaagggtctgatggttgc

SEQ ID NO: 1082 - DNA, 20 bp, Homo sapiens
  source 1..20: mol_type = genomic DNA
gaaaatgcccatcgtctcaa

SEQ ID NO: 1083 - DNA, 20 bp, Homo sapiens
  source 1..20: mol_type = genomic DNA
attccttgtctttccccctc

SEQ ID NO: 1084 - DNA, 22 bp, Homo sapiens
  source 1..22: mol_type = genomic DNA
tcatttctctagcccaaagatg

SEQ ID NO: 1085 - DNA, 20 bp, Homo sapiens
  source 1..20: mol_type = genomic DNA
ttggtttgttgacttcagcc

SEQ ID NO: 1086 - DNA, 20 bp, Homo sapiens
  source 1..20: mol_type = genomic DNA
gctcagtgacagttgggatt

SEQ ID NO: 1087 - DNA, 22 bp, Homo sapiens
  source 1..22: mol_type = genomic DNA
gtcttgtctctcttcttccact

SEQ ID NO: 1088 - DNA, 20 bp, Homo sapiens
  source 1..20: mol_type = genomic DNA
tttagagcaggtggaaacga

SEQ ID NO: 1089 - DNA, 21 bp, Homo sapiens
  source 1..21: mol_type = genomic DNA
cttgggtttttatcggttgct

SEQ ID NO: 1090 - DNA, 20 bp, Homo sapiens
  source 1..20: mol_type = genomic DNA
gttgcctggattgctctaaa

SEQ ID NO: 1091 - DNA, 20 bp, Homo sapiens
  source 1..20: mol_type = genomic DNA
aaatcacgacgtaggaaacc

SEQ ID NO: 1092 - DNA, 20 bp, Homo sapiens
  source 1..20: mol_type = genomic DNA
tcaccttggagcaggtcata

SEQ ID NO: 1093 - DNA, 20 bp, Homo sapiens
  source 1..20: mol_type = genomic DNA
cgaagaaggtctgggagatg

SEQ ID NO: 1094 - DNA, 21 bp, Homo sapiens
  source 1..21: mol_type = genomic DNA
caccattgtttcatcaggact

SEQ ID NO: 1095 - DNA, 21 bp, Homo sapiens
  source 1..21: mol_type = genomic DNA
ttgcatcatcagctcacatac

SEQ ID NO: 1096 - DNA, 20 bp, Homo sapiens
  source 1..20: mol_type = genomic DNA
agacctggaaaatgatgggt

SEQ ID NO: 1097 - DNA, 20 bp, Homo sapiens
  source 1..20: mol_type = genomic DNA
cctggaagtgtgtaacaagc

SEQ ID NO: 1098 - DNA, 21 bp, Homo sapiens
  source 1..21: mol_type = genomic DNA
ctccctagcaaaaacttctca

SEQ ID NO: 1099 - DNA, 20 bp, Homo sapiens
  source 1..20: mol_type = genomic DNA
tgccttattcactgtgcaac

SEQ ID NO: 1100 - DNA, 20 bp, Homo sapiens
  source 1..20: mol_type = genomic DNA
tgatggcctagtgagtttcc

SEQ ID NO: 1101 - DNA, 20 bp, Homo sapiens
  source 1..20: mol_type = genomic DNA
tgcaatgtaacaaaagcgtg

SEQ ID NO: 1102 - DNA, 20 bp, Homo sapiens
  source 1..20: mol_type = genomic DNA
gccacatttgctttcacaca

SEQ ID NO: 1103 - DNA, 19 bp, Homo sapiens
  source 1..19: mol_type = genomic DNA
acgtcattgggttcatggc

SEQ ID NO: 1104 - DNA, 20 bp, Homo sapiens
  source 1..20: mol_type = genomic DNA
attttacccccttaggcacc

SEQ ID NO: 1105 - DNA, 20 bp, Homo sapiens
  source 1..20: mol_type = genomic DNA
tcttctacacagcccttcag

SEQ ID NO: 1106 - DNA, 20 bp, Homo sapiens
  source 1..20: mol_type = genomic DNA
attgggatcgtcagcatcaa

SEQ ID NO: 1107 - DNA, 20 bp, Homo sapiens
  source 1..20: mol_type = genomic DNA
tgattgtcttgtccactggt

SEQ ID NO: 1108 - DNA, 20 bp, Homo sapiens
  source 1..20: mol_type = genomic DNA
acatcacacttcatgccctt

SEQ ID NO: 1109 - DNA, 20 bp, Homo sapiens
  source 1..20: mol_type = genomic DNA
atgaaggcattaggagggag

SEQ ID NO: 1110 - DNA, 20 bp, Homo sapiens
  source 1..20: mol_type = genomic DNA
aaagtggagaagtggcagat

SEQ ID NO: 1111 - DNA, 22 bp, Homo sapiens
  source 1..22: mol_type = genomic DNA
ccttaggattctgagaggtgag

SEQ ID NO: 1112 - DNA, 20 bp, Homo sapiens
  source 1..20: mol_type = genomic DNA
agggcttctgattgatttgc

SEQ ID NO: 1113 - DNA, 20 bp, Homo sapiens
  source 1..20: mol_type = genomic DNA
cagggtagtcgggatttctc

SEQ ID NO: 1114 - DNA, 20 bp, Homo sapiens
  source 1..20: mol_type = genomic DNA
cccggtaatgatctacagca

SEQ ID NO: 1115 - DNA, 19 bp, Homo sapiens
  source 1..19: mol_type = genomic DNA
aacggcacttggttcacta

SEQ ID NO: 1116 - DNA, 20 bp, Homo sapiens
  source 1..20: mol_type = genomic DNA
actctgaactcctcctcctg

SEQ ID NO: 1117 - DNA, 20 bp, Homo sapiens
  source 1..20: mol_type = genomic DNA
tttgctcacacacaagacac

SEQ ID NO: 1118 - DNA, 20 bp, Homo sapiens
  source 1..20: mol_type = genomic DNA
acgactgcatccttttcatg

SEQ ID NO: 1119 - DNA, 22 bp, Homo sapiens
  source 1..22: mol_type = genomic DNA
ccatcatagcctacaaataccc

SEQ ID NO: 1120 - DNA, 22 bp, Homo sapiens
  source 1..22: mol_type = genomic DNA
agagagttgaaaatatccccca

SEQ ID NO: 1121 - DNA, 20 bp, Homo sapiens
  source 1..20: mol_type = genomic DNA
actttcttgaacaccccagt

SEQ ID NO: 1122 - DNA, 20 bp, Homo sapiens
  source 1..20: mol_type = genomic DNA
tgcctgtgtcctacttttcc

SEQ ID NO: 1123 - DNA, 20 bp, Homo sapiens
  source 1..20: mol_type = genomic DNA
tgactgcccaagaatgtaca

SEQ ID NO: 1124 - DNA, 20 bp, Homo sapiens
  source 1..20: mol_type = genomic DNA
ccgaacacgctgtatgtatt

SEQ ID NO: 1125 - DNA, 20 bp, Homo sapiens
  source 1..20: mol_type = genomic DNA
ggaagggaattgaagcacag

SEQ ID NO: 1126 - DNA, 20 bp, Homo sapiens
  source 1..20: mol_type = genomic DNA
tcatcctatccaccaacctg

SEQ ID NO: 1127 - DNA, 20 bp, Homo sapiens
  source 1..20: mol_type = genomic DNA
aatgaactggccctgactta

SEQ ID NO: 1128 - DNA, 20 bp, Homo sapiens
  source 1..20: mol_type = genomic DNA
taagataccataccgcagct

SEQ ID NO: 1129 - DNA, 21 bp, Homo sapiens
  source 1..21: mol_type = genomic DNA
tcagcgttcatggtaccaata

SEQ ID NO: 1130 - DNA, 21 bp, Homo sapiens
  source 1..21: mol_type = genomic DNA
gtttcccaaccaacaaacaag

SEQ ID NO: 1131 - DNA, 20 bp, Homo sapiens
  source 1..20: mol_type = genomic DNA
tctatcgggatggagagtga

SEQ ID NO: 1132 - DNA, 20 bp, Homo sapiens
  source 1..20: mol_type = genomic DNA
gttcagacaggtggactagg

SEQ ID NO: 1133 - DNA, 20 bp, Homo sapiens
  source 1..20: mol_type = genomic DNA
aagcaacctgggaaattgtg

SEQ ID NO: 1134 - DNA, 20 bp, Homo sapiens
  source 1..20: mol_type = genomic DNA
gggttaaggttgctgggtta

SEQ ID NO: 1135 - DNA, 21 bp, Homo sapiens
  source 1..21: mol_type = genomic DNA
gtgaaatgtggttgtagtgca

SEQ ID NO: 1136 - DNA, 20 bp, Homo sapiens
  source 1..20: mol_type = genomic DNA
gtgactgccttgcttcattt

SEQ ID NO: 1137 - DNA, 20 bp, Homo sapiens
  source 1..20: mol_type = genomic DNA
cagttctggagccttctact

SEQ ID NO: 1138 - DNA, 20 bp, Homo sapiens
  source 1..20: mol_type = genomic DNA
ttagggcaggatgtacagaa

SEQ ID NO: 1139 - DNA, 20 bp, Homo sapiens
  source 1..20: mol_type = genomic DNA
gctggtgaccttcattcaag

SEQ ID NO: 1140 - DNA, 19 bp, Homo sapiens
  source 1..19: mol_type = genomic DNA
taaaaccatgttcggggca

SEQ ID NO: 1141 - DNA, 21 bp, Homo sapiens
  source 1..21: mol_type = genomic DNA
ctacctgtccgtttcccttac

SEQ ID NO: 1142 - DNA, 21 bp, Homo sapiens
  source 1..21: mol_type = genomic DNA
gacaaagatgactggaggtga

SEQ ID NO: 1143 - DNA, 21 bp, Homo sapiens
  source 1..21: mol_type = genomic DNA
gggtggatggtgagatatgtg

SEQ ID NO: 1144 - DNA, 21 bp, Homo sapiens
  source 1..21: mol_type = genomic DNA
cttcaaacctgatccatgtgc

SEQ ID NO: 1145 - DNA, 21 bp, Homo sapiens
  source 1..21: mol_type = genomic DNA
gcagaaacagcatgaatctcc

SEQ ID NO: 1146 - DNA, 21 bp, Homo sapiens
  source 1..21: mol_type = genomic DNA
tgacttcaaacatcccatcca

SEQ ID NO: 1147 - DNA, 21 bp, Homo sapiens
  source 1..21: mol_type = genomic DNA
gtgggatgagttctagaggaa

SEQ ID NO: 1148 - DNA, 21 bp, Homo sapiens
  source 1..21: mol_type = genomic DNA
agtcacacacatacacacagt

SEQ ID NO: 1149 - DNA, 21 bp, Homo sapiens
  source 1..21: mol_type = genomic DNA
acgacttccctgtgtaactta

SEQ ID NO: 1150 - DNA, 21 bp, Homo sapiens
  source 1..21: mol_type = genomic DNA
ccttctcttgtctctagtgcc

SEQ ID NO: 1151 - DNA, 21 bp, Homo sapiens
  source 1..21: mol_type = genomic DNA
ctggaaatacacacacacctg

SEQ ID NO: 1152 - DNA, 21 bp, Homo sapiens
  source 1..21: mol_type = genomic DNA
atttgtaaaccacccacttcg

SEQ ID NO: 1153 - DNA, 21 bp, Homo sapiens
  source 1..21: mol_type = genomic DNA
tcactgtgctgacaaatccta

SEQ ID NO: 1154 - DNA, 21 bp, Homo sapiens
  source 1..21: mol_type = genomic DNA
cccatcatcatcccttcagac

SEQ ID NO: 1155 - DNA, 21 bp, Homo sapiens
  source 1..21: mol_type = genomic DNA
tcatcactttatcctcccagt

SEQ ID NO: 1156 - DNA, 21 bp, Homo sapiens
  source 1..21: mol_type = genomic DNA
atgggcacaggtaaagagttt

SEQ ID NO: 1157 - DNA, 21 bp, Homo sapiens
  source 1..21: mol_type = genomic DNA
tttgtaagctgagtgtgaggt

SEQ ID NO: 1158 - DNA, 21 bp, Homo sapiens
  source 1..21: mol_type = genomic DNA
ttactgtttgaatgccagctc

SEQ ID NO: 1159 - DNA, 21 bp, Homo sapiens
  source 1..21: mol_type = genomic DNA
tcccttctcccatcacaattc

SEQ ID NO: 1160 - DNA, 21 bp, Homo sapiens
  source 1..21: mol_type = genomic DNA
gaagactgcatgtgtgtccta

SEQ ID NO: 1161 - DNA, 21 bp, Homo sapiens
  source 1..21: mol_type = genomic DNA
ttctcactctcaactgaacca

SEQ ID NO: 1162 - DNA, 22 bp, Homo sapiens
  source 1..22: mol_type = genomic DNA
tcagggagcttctaattaagga

SEQ ID NO: 1163 - DNA, 21 bp, Homo sapiens
  source 1..21: mol_type = genomic DNA
aagatgatcccaggcttaagg

SEQ ID NO: 1164 - DNA, 21 bp, Homo sapiens
  source 1..21: mol_type = genomic DNA
gttgaggtttgctgatcttgg

SEQ ID NO: 1165 - DNA, 21 bp, Homo sapiens
  source 1..21: mol_type = genomic DNA
caaagatagattcgcacacca

SEQ ID NO: 1166 - DNA, 21 bp, Homo sapiens
  source 1..21: mol_type = genomic DNA
gagctggacaaattaaatggc

SEQ ID NO: 1167 - DNA, 20 bp, Homo sapiens
  source 1..20: mol_type = genomic DNA
ccagtgcatttggtttgaca

SEQ ID NO: 1168 - DNA, 21 bp, Homo sapiens
  source 1..21: mol_type = genomic DNA
tatgtgaatcctctgtgtggc

SEQ ID NO: 1169 - DNA, 21 bp, Homo sapiens
  source 1..21: mol_type = genomic DNA
agcttctctctcattctgctt

SEQ ID NO: 1170 - DNA, 21 bp, Homo sapiens
  source 1..21: mol_type = genomic DNA
gactcccgatttcatttgctg

SEQ ID NO: 1171 - DNA, 22 bp, Homo sapiens
  source 1..22: mol_type = genomic DNA
tcccaatcgttgtgaaacatac

SEQ ID NO: 1172 - DNA, 21 bp, Homo sapiens
  source 1..21: mol_type = genomic DNA
tctttacaggaagttgggacc

SEQ ID NO: 1173 - DNA, 21 bp, Homo sapiens
  source 1..21: mol_type = genomic DNA
taagttcagatcagggagcag

SEQ ID NO: 1174 - DNA, 22 bp, Homo sapiens
  source 1..22: mol_type = genomic DNA
gttgaaagtcttacagaacgct

SEQ ID NO: 1175 - DNA, 21 bp, Homo sapiens
  source 1..21: mol_type = genomic DNA
caacataggcacattgtcctc

SEQ ID NO: 1176 - DNA, 21 bp, Homo sapiens
  source 1..21: mol_type = genomic DNA
gtcaggcctcataactctctt

SEQ ID NO: 1177 - DNA, 21 bp, Homo sapiens
  source 1..21: mol_type = genomic DNA
gttgtgtggctttccttatca

SEQ ID NO: 1178 - DNA, 21 bp, Homo sapiens
  source 1..21: mol_type = genomic DNA
cctgcagctctgtgtaaattt

SEQ ID NO: 1179 - DNA, 21 bp, Homo sapiens
  source 1..21: mol_type = genomic DNA
ctttggccagttctttctctc

SEQ ID NO: 1180 - DNA, 20 bp, Homo sapiens
  source 1..20: mol_type = genomic DNA
gtggcccagcattatttgtt

SEQ ID NO: 1181 - DNA, 21 bp, Homo sapiens
  source 1..21: mol_type = genomic DNA
tcttggtgtgacttgctaaca

SEQ ID NO: 1182 - DNA, 21 bp, Homo sapiens
  source 1..21: mol_type = genomic DNA
tttctggctgagataagaccc

SEQ ID NO: 1183 - DNA, 21 bp, Homo sapiens
  source 1..21: mol_type = genomic DNA
acaattccgtggtatacagct

SEQ ID NO: 1184 - DNA, 21 bp, Homo sapiens
  source 1..21: mol_type = genomic DNA
tgattgtgccctaaccaaact

SEQ ID NO: 1185 - DNA, 21 bp, Homo sapiens
  source 1..21: mol_type = genomic DNA
tgtcgtatcctgctgtttaga

SEQ ID NO: 1186 - DNA, 21 bp, Homo sapiens
  source 1..21: mol_type = genomic DNA
tcaggagtaaagtcaggacct

SEQ ID NO: 1187 - DNA, 21 bp, Homo sapiens
  source 1..21: mol_type = genomic DNA
tgagctgatttactgtgacac

SEQ ID NO: 1188 - DNA, 21 bp, Homo sapiens
  source 1..21: mol_type = genomic DNA
tagcaccttgacttcaggatt

SEQ ID NO: 1189 - DNA, 21 bp, Homo sapiens
  source 1..21: mol_type = genomic DNA
tgaggttggaaagggtcaatt

SEQ ID NO: 1190 - DNA, 21 bp, Homo sapiens
  source 1..21: mol_type = genomic DNA
cagctttccttcctcttctct

SEQ ID NO: 1191 - DNA, 21 bp, Homo sapiens
  source 1..21: mol_type = genomic DNA
acagtgagaggaaagaacagc

SEQ ID NO: 1192 - DNA, 21 bp, Homo sapiens
  source 1..21: mol_type = genomic DNA
ggaaataaattgtgagctggc

SEQ ID NO: 1193 - DNA, 21 bp, Homo sapiens
  source 1..21: mol_type = genomic DNA
agacagcccttcaatccatac

SEQ ID NO: 1194 - DNA, 21 bp, Homo sapiens
  source 1..21: mol_type = genomic DNA
cctacatcccttcctcctttc

SEQ ID NO: 1195 - DNA, 21 bp, Homo sapiens
  source 1..21: mol_type = genomic DNA
tcacccatcttccaattagct

SEQ ID NO: 1196 - DNA, 22 bp, Homo sapiens
  source 1..22: mol_type = genomic DNA
tttctaagcacaaactgacacc

SEQ ID NO: 1197 - DNA, 21 bp, Homo sapiens
  source 1..21: mol_type = genomic DNA
gatgtttgcactggagggata

SEQ ID NO: 1198 - DNA, 21 bp, Homo sapiens
  source 1..21: mol_type = genomic DNA
gaagactaaatgttggccgaa

SEQ ID NO: 1199 - DNA, 21 bp, Homo sapiens
  source 1..21: mol_type = genomic DNA
gtagagagagggaggatcaca

SEQ ID NO: 1200 - DNA, 21 bp, Homo sapiens
  source 1..21: mol_type = genomic DNA
cttgccatgaagtttgaccag

SEQ ID NO: 1201 - DNA, 21 bp, Homo sapiens
  source 1..21: mol_type = genomic DNA
aggatgagcatttgtaacctg

SEQ ID NO: 1202 - DNA, 21 bp, Homo sapiens
  source 1..21: mol_type = genomic DNA
tgtcgctttcaaattacccac

SEQ ID NO: 1203 - DNA, 21 bp, Homo sapiens
  source 1..21: mol_type = genomic DNA
catacaagtgctctgttaggc

SEQ ID NO: 1204 - DNA, 21 bp, Homo sapiens
  source 1..21: mol_type = genomic DNA
aggacttggaaccagaaagac

SEQ ID NO: 1205 - DNA, 21 bp, Homo sapiens
  source 1..21: mol_type = genomic DNA
aaagagggctgatatcgtctg

SEQ ID NO: 1206 - DNA, 21 bp, Homo sapiens
  source 1..21: mol_type = genomic DNA
ctcactgcaaactatggaacc

SEQ ID NO: 1207 - DNA, 21 bp, Homo sapiens
  source 1..21: mol_type = genomic DNA
tattctgcccatcttcttcct

SEQ ID NO: 1208 - DNA, 20 bp, Homo sapiens
  source 1..20: mol_type = genomic DNA
ggagacagcccaaacataga

SEQ ID NO: 1209 - DNA, 21 bp, Homo sapiens
  source 1..21: mol_type = genomic DNA
agcaatggtgaagttctggat

SEQ ID NO: 1210 - DNA, 21 bp, Homo sapiens
  source 1..21: mol_type = genomic DNA
ctggtcagtgagagaagggaa

SEQ ID NO: 1211 - DNA, 20 bp, Homo sapiens
  source 1..20: mol_type = genomic DNA
tttctccactggcatgaact

SEQ ID NO: 1212 - DNA, 21 bp, Homo sapiens
  source 1..21: mol_type = genomic DNA
catgatcacaattccaagcca

SEQ ID NO: 1213 - DNA, 21 bp, Homo sapiens
  source 1..21: mol_type = genomic DNA
acccagtcaagttacagtctt

SEQ ID NO: 1214 - DNA, 22 bp, Homo sapiens
  source 1..22: mol_type = genomic DNA
tgtaaagcatatcaagggaacg

SEQ ID NO: 1215 - DNA, 21 bp, Homo sapiens
  source 1..21: mol_type = genomic DNA
tgcagagatatgttcccgtat

SEQ ID NO: 1216 - DNA, 21 bp, Homo sapiens
  source 1..21: mol_type = genomic DNA
agaagacagtacaaggaaggc

SEQ ID NO: 1217 - DNA, 21 bp, Homo sapiens
  source 1..21: mol_type = genomic DNA
tgtttgccatttgttctcctc

SEQ ID NO: 1218 - DNA, 21 bp, Homo sapiens
  source 1..21: mol_type = genomic DNA
ttgaaggcaagagaagtttgg

SEQ ID NO: 1219 - DNA, 21 bp, Homo sapiens
  source 1..21: mol_type = genomic DNA
gccaaggaaatgtagggaaag

SEQ ID NO: 1220 - DNA, 21 bp, Homo sapiens
  source 1..21: mol_type = genomic DNA
aaccttcacacctagagacag

SEQ ID NO: 1221 - DNA, 21 bp, Homo sapiens
  source 1..21: mol_type = genomic DNA
gcataacagggaaagtcacct

SEQ ID NO: 1222 - DNA, 21 bp, Homo sapiens
  source 1..21: mol_type = genomic DNA
aggatgttagtggtttgggta

SEQ ID NO: 1223 - DNA, 20 bp, Homo sapiens
  source 1..20: mol_type = genomic DNA
tctgacactgaccttcaact

SEQ ID NO: 1224 - DNA, 20 bp, Homo sapiens
  source 1..20: mol_type = genomic DNA
gaaacattgctttccctcca

SEQ ID NO: 1225 - DNA, 20 bp, Homo sapiens
  source 1..20: mol_type = genomic DNA
ttccacacatctcttctccg

SEQ ID NO: 1226 - DNA, 20 bp, Homo sapiens
  source 1..20: mol_type = genomic DNA
gggagccttgaaaacctgaa

SEQ ID NO: 1227 - DNA, 19 bp, Homo sapiens
  source 1..19: mol_type = genomic DNA
attggtagcgttgtcagca

SEQ ID NO: 1228 - DNA, 20 bp, Homo sapiens
  source 1..20: mol_type = genomic DNA
ttcctgcatcttgtagaccc

SEQ ID NO: 1229 - DNA, 20 bp, Homo sapiens
  source 1..20: mol_type = genomic DNA
gggctaatgttttgcttcca

SEQ ID NO: 1230 - DNA, 20 bp, Homo sapiens
  source 1..20: mol_type = genomic DNA
tgttgattagagcttccccc

SEQ ID NO: 1231 - DNA, 19 bp, Homo sapiens
  source 1..19: mol_type = genomic DNA
agaggttttcttccccgtg

SEQ ID NO: 1232 - DNA, 20 bp, Homo sapiens
  source 1..20: mol_type = genomic DNA
tagtgccctctattgtgcct

SEQ ID NO: 1233 - DNA, 20 bp, Homo sapiens
  source 1..20: mol_type = genomic DNA
actgctggactttgaaatgc

SEQ ID NO: 1234 - DNA, 20 bp, Homo sapiens
  source 1..20: mol_type = genomic DNA
caaacagtgagatgtggctg

SEQ ID NO: 1235 - DNA, 21 bp, Homo sapiens
  source 1..21: mol_type = genomic DNA
ttgcttcctgaaaactggttc

SEQ ID NO: 1236 - DNA, 20 bp, Homo sapiens
  source 1..20: mol_type = genomic DNA
attccaatcacgtctctgca

SEQ ID NO: 1237 - DNA, 20 bp, Homo sapiens
  source 1..20: mol_type = genomic DNA
acaatctcacagcctggaaa

SEQ ID NO: 1238 - DNA, 20 bp, Homo sapiens
  source 1..20: mol_type = genomic DNA
tcagatgggtgaggttcttg

SEQ ID NO: 1239 - DNA, 20 bp, Homo sapiens
  source 1..20: mol_type = genomic DNA
ctgctccttccctccaatta

SEQ ID NO: 1240 - DNA, 20 bp, Homo sapiens
  source 1..20: mol_type = genomic DNA
aaatgccagtcctgtaaagg

SEQ ID NO: 1241 - DNA, 20 bp, Homo sapiens
  source 1..20: mol_type = genomic DNA
tgtcccattgcttaggaagt

SEQ ID NO: 1242 - DNA, 20 bp, Homo sapiens
  source 1..20: mol_type = genomic DNA
tgtgtgatccagagacccta

SEQ ID NO: 1243 - DNA, 20 bp, Homo sapiens
  source 1..20: mol_type = genomic DNA
accaatgtagacttagcggg

SEQ ID NO: 1244 - DNA, 20 bp, Homo sapiens
  source 1..20: mol_type = genomic DNA
actctcatattgccccactt

SEQ ID NO: 1245 - DNA, 20 bp, Homo sapiens
  source 1..20: mol_type = genomic DNA
ccagggattgatgtactggt

SEQ ID NO: 1246 - DNA, 20 bp, Homo sapiens
  source 1..20: mol_type = genomic DNA
aattctggtctatctggcgt

SEQ ID NO: 1247 - DNA, 20 bp, Homo sapiens
  source 1..20: mol_type = genomic DNA
gccagcccttttcacatatt

SEQ ID NO: 1248 - DNA, 20 bp, Homo sapiens
  source 1..20: mol_type = genomic DNA
aactacaccatcccctgttt

SEQ ID NO: 1249 - DNA, 20 bp, Homo sapiens
  source 1..20: mol_type = genomic DNA
ccatttcaaacatgctggtc

SEQ ID NO: 1250 - DNA, 22 bp, Homo sapiens
  source 1..22: mol_type = genomic DNA
agattataagaaggcagggaac

SEQ ID NO: 1251 - DNA, 22 bp, Homo sapiens
  source 1..22: mol_type = genomic DNA
gtagagggcttaaaacatgtcc

SEQ ID NO: 1252 - DNA, 21 bp, Homo sapiens
  source 1..21: mol_type = genomic DNA
acaagaacacagtcgttaagc

SEQ ID NO: 1253 - DNA, 20 bp, Homo sapiens
  source 1..20: mol_type = genomic DNA
tctctccttcactcccttca

SEQ ID NO: 1254 - DNA, 20 bp, Homo sapiens
  source 1..20: mol_type = genomic DNA
tgtccacccctctttgattg

SEQ ID NO: 1255 - DNA, 20 bp, Homo sapiens
  source 1..20: mol_type = genomic DNA
tttagcttctcctgcctttg

SEQ ID NO: 1256 - DNA, 20 bp, Homo sapiens
  source 1..20: mol_type = genomic DNA
agaagcaattcaccaggtca

SEQ ID NO: 1257 - DNA, 20 bp, Homo sapiens
  source 1..20: mol_type = genomic DNA
tggagtcagaagtgtgtgtt

SEQ ID NO: 1258 - DNA, 20 bp, Homo sapiens
  source 1..20: mol_type = genomic DNA
tctggtgtcaaagcttaggg

SEQ ID NO: 1259 - DNA, 20 bp, Homo sapiens
  source 1..20: mol_type = genomic DNA
tgccgatgatgtgtgttttg

SEQ ID NO: 1260 - DNA, 20 bp, Homo sapiens
  source 1..20: mol_type = genomic DNA
tgtcccttcctaatcccaaa

SEQ ID NO: 1261 - DNA, 20 bp, Homo sapiens
  source 1..20: mol_type = genomic DNA
aggatgtttaagttgcagca

SEQ ID NO: 1262 - DNA, 20 bp, Homo sapiens
  source 1..20: mol_type = genomic DNA
tatgcagttttaccccctcc

SEQ ID NO: 1263 - DNA, 20 bp, Homo sapiens
  source 1..20: mol_type = genomic DNA
ttctgtgtggtctcctcttg

SEQ ID NO: 1264 - DNA, 20 bp, Homo sapiens
  source 1..20: mol_type = genomic DNA
atggagggacaagtgagaca

SEQ ID NO: 1265 - DNA, 20 bp, Homo sapiens
  source 1..20: mol_type = genomic DNA
ggggaacatggagctgtaaa

SEQ ID NO: 1266 - DNA, 20 bp, Homo sapiens
  source 1..20: mol_type = genomic DNA
ggaccccctaccacatttac

SEQ ID NO: 1267 - DNA, 21 bp, Homo sapiens
  source 1..21: mol_type = genomic DNA
agatggagaaatgtgcagaga

SEQ ID NO: 1268 - DNA, 19 bp, Homo sapiens
  source 1..19: mol_type = genomic DNA
atgactgcatccaagagca

SEQ ID NO: 1269 - DNA, 20 bp, Homo sapiens
  source 1..20: mol_type = genomic DNA
cagaatttccaggcagttgt

SEQ ID NO: 1270 - DNA, 21 bp, Homo sapiens
  source 1..21: mol_type = genomic DNA
gaatccagaagctcagtcctt

SEQ ID NO: 1271 - DNA, 20 bp, Homo sapiens
  source 1..20: mol_type = genomic DNA
agccctggaatcttgacatt

SEQ ID NO: 1272 - DNA, 19 bp, Homo sapiens
  source 1..19: mol_type = genomic DNA
gtgcattatacggatggcc

SEQ ID NO: 1273 - DNA, 20 bp, Homo sapiens
  source 1..20: mol_type = genomic DNA
ggtagagggtcctgtgattc

SEQ ID NO: 1274 - DNA, 20 bp, Homo sapiens
  source 1..20: mol_type = genomic DNA
gtaactgctagccactgagt

SEQ ID NO: 1275 - DNA, 20 bp, Homo sapiens
  source 1..20: mol_type = genomic DNA
gcctttttgggaatcctagt

SEQ ID NO: 1276 - DNA, 20 bp, Homo sapiens
  source 1..20: mol_type = genomic DNA
aagggtggaagcacattgac

SEQ ID NO: 1277 - DNA, 20 bp, Homo sapiens
  source 1..20: mol_type = genomic DNA
atagaggaacaagctgcaca

SEQ ID NO: 1278 - DNA, 20 bp, Homo sapiens
  source 1..20: mol_type = genomic DNA
ctcgtcccttgcacatctta

SEQ ID NO: 1279 - DNA, 20 bp, Homo sapiens
  source 1..20: mol_type = genomic DNA
aggtggggaagaacaaaaca

SEQ ID NO: 1280 - DNA, 20 bp, Homo sapiens
  source 1..20: mol_type = genomic DNA
gagagtaggtgcagggaaac

SEQ ID NO: 1281 - DNA, 20 bp, Homo sapiens
  source 1..20: mol_type = genomic DNA
atcccgcattcttaaccaca

SEQ ID NO: 1282 - DNA, 21 bp, Homo sapiens
  source 1..21: mol_type = genomic DNA
gactaagcaaaagcatctccc

SEQ ID NO: 1283 - DNA, 20 bp, Homo sapiens
  source 1..20: mol_type = genomic DNA
ttcttacaggctcagggtat

SEQ ID NO: 1284 - DNA, 21 bp, Homo sapiens
  source 1..21: mol_type = genomic DNA
cccatagcttaacccctacaa

SEQ ID NO: 1285 - DNA, 22 bp, Homo sapiens
  source 1..22: mol_type = genomic DNA
tcttcatcttactgtctagcac

SEQ ID NO: 1286 - DNA, 21 bp, Homo sapiens
  source 1..21: mol_type = genomic DNA
tcataccctatccctgtgatc

SEQ ID NO: 1287 - DNA, 21 bp, Homo sapiens
  source 1..21: mol_type = genomic DNA
tcttgcccttgatttgtttcc

SEQ ID NO: 1288 - DNA, 21 bp, Homo sapiens
  source 1..21: mol_type = genomic DNA
gccttttatccatatgccacc

SEQ ID NO: 1289 - DNA, 20 bp, Homo sapiens
  source 1..20: mol_type = genomic DNA
gccctcaactttgcttttca

SEQ ID NO: 1290 - DNA, 20 bp, Homo sapiens
  source 1..20: mol_type = genomic DNA
aaaaacctgcactgtgttcg

SEQ ID NO: 1291 - DNA, 22 bp, Homo sapiens
  source 1..22: mol_type = genomic DNA
tttttacagcaatcttcactgc

SEQ ID NO: 1292 - DNA, 22 bp, Homo sapiens
  source 1..22: mol_type = genomic DNA
taagccggaatgatttgtaagg

SEQ ID NO: 1293 - DNA, 20 bp, Homo sapiens
  source 1..20: mol_type = genomic DNA
taccctttggcttaacagct

SEQ ID NO: 1294 - DNA, 20 bp, Homo sapiens
  source 1..20: mol_type = genomic DNA
agttgtcatgttgggctcat

SEQ ID NO: 1295 - DNA, 22 bp, Homo sapiens
  source 1..22: mol_type = genomic DNA
tgtcctaagttacctgtctgac

SEQ ID NO: 1296 - DNA, 21 bp, Homo sapiens
  source 1..21: mol_type = genomic DNA
gccctggaaagtactgtaaca

SEQ ID NO: 1297 - DNA, 20 bp, Homo sapiens
  source 1..20: mol_type = genomic DNA
tgttacagccaggctttcat

SEQ ID NO: 1298 - DNA, 20 bp, Homo sapiens
  source 1..20: mol_type = genomic DNA
caacgaacacagggtttaca

SEQ ID NO: 1299 - DNA, 21 bp, Homo sapiens
  source 1..21: mol_type = genomic DNA
ccaggactctctcttttcttc

SEQ ID NO: 1300 - DNA, 22 bp, Homo sapiens
  source 1..22: mol_type = genomic DNA
gacacataagaccactttaggc

SEQ ID NO: 1301 - DNA, 21 bp, Homo sapiens
  source 1..21: mol_type = genomic DNA
gatatgttctggaggactgct

SEQ ID NO: 1302 - DNA, 20 bp, Homo sapiens
  source 1..20: mol_type = genomic DNA
tgattctcacaggctccttg

SEQ ID NO: 1303 - DNA, 22 bp, Homo sapiens
  source 1..22: mol_type = genomic DNA
tgatggaagtttctaggtcagt

SEQ ID NO: 1304 - DNA, 20 bp, Homo sapiens
  source 1..20: mol_type = genomic DNA
aacactcttgctccctatgt

SEQ ID NO: 1305 - DNA, 21 bp, Homo sapiens
  source 1..21: mol_type = genomic DNA
tttctctcccagcttgatctt

SEQ ID NO: 1306 - DNA, 20 bp, Homo sapiens
  source 1..20: mol_type = genomic DNA
ctgtgcagagacgaactaag

SEQ ID NO: 1307 - DNA, 19 bp, Homo sapiens
  source 1..19: mol_type = genomic DNA
ctctcggagcaaagacctt

SEQ ID NO: 1308 - DNA, 20 bp, Homo sapiens
  source 1..20: mol_type = genomic DNA
acctcataagtacgcccatc

SEQ ID NO: 1309 - DNA, 20 bp, Homo sapiens
  source 1..20: mol_type = genomic DNA
tgatcttcctttgctcctgt

SEQ ID NO: 1310 - DNA, 20 bp, Homo sapiens
  source 1..20: mol_type = genomic DNA
atgacgacgatgttggagag

SEQ ID NO: 1311 - DNA, 20 bp, Homo sapiens
  source 1..20: mol_type = genomic DNA
tccttcagcaagcctctttt

SEQ ID NO: 1312 - DNA, 20 bp, Homo sapiens
  source 1..20: mol_type = genomic DNA
tgagggtgataacctgtgag

SEQ ID NO: 1313 - DNA, 20 bp, Homo sapiens
  source 1..20: mol_type = genomic DNA
ggcttgaagtttgtctgtga

SEQ ID NO: 1314 - DNA, 20 bp, Homo sapiens
  source 1..20: mol_type = genomic DNA
ggattttcacattgctcagc

SEQ ID NO: 1315 - DNA, 21 bp, Homo sapiens
  source 1..21: mol_type = genomic DNA
tagcatgagagtgaactgagg

SEQ ID NO: 1316 - DNA, 20 bp, Homo sapiens
  source 1..20: mol_type = genomic DNA
cagccacatagcccatatct

SEQ ID NO: 1317 - DNA, 20 bp, Homo sapiens
  source 1..20: mol_type = genomic DNA
tgcccatgagtctacttgtg

SEQ ID NO: 1318 - DNA, 20 bp, Homo sapiens
  source 1..20: mol_type = genomic DNA
aagtggactgagggacaatt

SEQ ID NO: 1319 - DNA, 22 bp, Homo sapiens
  source 1..22: mol_type = genomic DNA
tcagactgagcattaaatcacc

SEQ ID NO: 1320 - DNA, 20 bp, Homo sapiens
  source 1..20: mol_type = genomic DNA
taggtctggaagaatgccag

SEQ ID NO: 1321 - DNA, 20 bp, Homo sapiens
  source 1..20: mol_type = genomic DNA
agtatcttgggcttgtgaca

SEQ ID NO: 1322 - DNA, 20 bp, Homo sapiens
  source 1..20: mol_type = genomic DNA
gctccacttccagtctttct

SEQ ID NO: 1323 - DNA, 20 bp, Homo sapiens
  source 1..20: mol_type = genomic DNA
ttggaatagtgagcctccct

SEQ ID NO: 1324 - DNA, 20 bp, Homo sapiens
  source 1..20: mol_type = genomic DNA
tctggggctctttgtctttg

SEQ ID NO: 1325 - DNA, 20 bp, Homo sapiens
  source 1..20: mol_type = genomic DNA
atttttcctcccctgtagct

SEQ ID NO: 1326 - DNA, 20 bp, Homo sapiens
  source 1..20: mol_type = genomic DNA
ctgggcacactgtattacca

SEQ ID NO: 1327 - DNA, 20 bp, Homo sapiens
  source 1..20: mol_type = genomic DNA
caccacgtttctaatgcaga

SEQ ID NO: 1328 - DNA, 20 bp, Homo sapiens
  source 1..20: mol_type = genomic DNA
gagttgaaaaaggtccacgc

SEQ ID NO: 1329 - DNA, 20 bp, Homo sapiens
  source 1..20: mol_type = genomic DNA
cagaggaaagacacagtgct

SEQ ID NO: 1330 - DNA, 20 bp, Homo sapiens
  source 1..20: mol_type = genomic DNA
tcttggttttgaggctgtca

SEQ ID NO: 1331 - DNA, 20 bp, Homo sapiens
  source 1..20: mol_type = genomic DNA
atcagcctaattctccccac

SEQ ID NO: 1332 - DNA, 20 bp, Homo sapiens
  source 1..20: mol_type = genomic DNA
atcccccatcatccatactc

SEQ ID NO: 1333 - DNA, 20 bp, Homo sapiens
  source 1..20: mol_type = genomic DNA
catagctaggcctgtgagtg

SEQ ID NO: 1334 - DNA, 19 bp, Homo sapiens
  source 1..19: mol_type = genomic DNA
tcagcttgctccttctctg

SEQ ID NO: 1335 - DNA, 20 bp, Homo sapiens
  source 1..20: mol_type = genomic DNA
ctaggtcctcagcagtgttt

SEQ ID NO: 1336 - DNA, 21 bp, Homo sapiens
  source 1..21: mol_type = genomic DNA
tcccagagttaacaatacccc

SEQ ID NO: 1337 - DNA, 20 bp, Homo sapiens
  source 1..20: mol_type = genomic DNA
ccatttgcactgccgatttc

SEQ ID NO: 1338 - DNA, 21 bp, Homo sapiens
  source 1..21: mol_type = genomic DNA
actagtcccaaaagcctacac

SEQ ID NO: 1339 - DNA, 20 bp, Homo sapiens
  source 1..20: mol_type = genomic DNA
aacagcagcgtcagaataac

SEQ ID NO: 1340 - DNA, 20 bp, Homo sapiens
  source 1..20: mol_type = genomic DNA
aggtctttacgggaaggaaa

SEQ ID NO: 1341 - DNA, 20 bp, Homo sapiens
  source 1..20: mol_type = genomic DNA
tgagggagaagtttggtagg

SEQ ID NO: 1342 - DNA, 20 bp, Homo sapiens
  source 1..20: mol_type = genomic DNA
ccctgtctaaagagccatgt

SEQ ID NO: 1343 - DNA, 20 bp, Homo sapiens
  source 1..20: mol_type = genomic DNA
gtttggagtttcgatgcctt

SEQ ID NO: 1344 - DNA, 20 bp, Homo sapiens
  source 1..20: mol_type = genomic DNA
atgttttggtcctgggagaa

SEQ ID NO: 1345 - DNA, 20 bp, Homo sapiens
  source 1..20: mol_type = genomic DNA
ggaagtggttagggcagatt

SEQ ID NO: 1346 - DNA, 21 bp, Homo sapiens
  source 1..21: mol_type = genomic DNA
agcccagtaaagataagaggc

SEQ ID NO: 1347 - DNA, 20 bp, Homo sapiens
  source 1..20: mol_type = genomic DNA
cccttccctttcatccaaga

SEQ ID NO: 1348 - DNA, 20 bp, Homo sapiens
  source 1..20: mol_type = genomic DNA
ctgaaaccttctccttagcc

SEQ ID NO: 1349 - DNA, 20 bp, Homo sapiens
  source 1..20: mol_type = genomic DNA
attatccaacctgacctgca

SEQ ID NO: 1350 - DNA, 19 bp, Homo sapiens
  source 1..19: mol_type = genomic DNA
aggtgcaaagctgttcatg

SEQ ID NO: 1351 - DNA, 20 bp, Homo sapiens
  source 1..20: mol_type = genomic DNA
aatgccaagattgtccttca

SEQ ID NO: 1352 - DNA, 19 bp, Homo sapiens
  source 1..19: mol_type = genomic DNA
tgcgaaacctcagtgatca

SEQ ID NO: 1353 - DNA, 20 bp, Homo sapiens
  source 1..20: mol_type = genomic DNA
cacttccttcagcacacttt

SEQ ID NO: 1354 - DNA, 20 bp, Homo sapiens
  source 1..20: mol_type = genomic DNA
ccggctctctatgaaagtga

SEQ ID NO: 1355 - DNA, 20 bp, Homo sapiens
  source 1..20: mol_type = genomic DNA
acttgtctgtctgcctgttt

SEQ ID NO: 1356 - DNA, 19 bp, Homo sapiens
  source 1..19: mol_type = genomic DNA
ctgatgcgctgaaaaccaa

SEQ ID NO: 1357 - DNA, 20 bp, Homo sapiens
  source 1..20: mol_type = genomic DNA
ttccatgtgttcttcctccc

SEQ ID NO: 1358 - DNA, 20 bp, Homo sapiens
  source 1..20: mol_type = genomic DNA
agcagtagggttaacaggag

SEQ ID NO: 1359 - DNA, 19 bp, Homo sapiens
  source 1..19: mol_type = genomic DNA
gcagcaatgtttcggtgta

SEQ ID NO: 1360 - DNA, 20 bp, Homo sapiens
  source 1..20: mol_type = genomic DNA
tactaatggctgggggtaac

SEQ ID NO: 1361 - DNA, 20 bp, Homo sapiens
  source 1..20: mol_type = genomic DNA
ctgatgaggctaaaggacca

SEQ ID NO: 1362 - DNA, 20 bp, Homo sapiens
  source 1..20: mol_type = genomic DNA
cagagttctccatcccagac

SEQ ID NO: 1363 - DNA, 20 bp, Homo sapiens
  source 1..20: mol_type = genomic DNA
ctgagttcctccttttgcct

SEQ ID NO: 1364 - DNA, 20 bp, Homo sapiens
  source 1..20: mol_type = genomic DNA
gcaaaaggtggtgttagctg

SEQ ID NO: 1365 - DNA, 20 bp, Homo sapiens
  source 1..20: mol_type = genomic DNA
atccacatcccatgcctaag

SEQ ID NO: 1366 - DNA, 20 bp, Homo sapiens
  source 1..20: mol_type = genomic DNA
tctattcctttggcacctcc

SEQ ID NO: 1367 - DNA, 20 bp, Homo sapiens
  source 1..20: mol_type = genomic DNA
aggaaaggagagctttgtcc

SEQ ID NO: 1368 - DNA, 20 bp, Homo sapiens
  source 1..20: mol_type = genomic DNA
cctttcagcttccaagtcct

SEQ ID NO: 1369 - DNA, 21 bp, Homo sapiens
  source 1..21: mol_type = genomic DNA
gctctcttcctcccactaaaa

SEQ ID NO: 1370 - DNA, 20 bp, Homo sapiens
  source 1..20: mol_type = genomic DNA
actgcctgtgttttcttcct

SEQ ID NO: 1371 - DNA, 20 bp, Homo sapiens
  source 1..20: mol_type = genomic DNA
aaagcaatttcttccccagc

SEQ ID NO: 1372 - DNA, 20 bp, Homo sapiens
  source 1..20: mol_type = genomic DNA
tgtctgttgccattccttct

SEQ ID NO: 1373 - DNA, 20 bp, Homo sapiens
  source 1..20: mol_type = genomic DNA
tgactgtgacttgtgctttc

SEQ ID NO: 1374 - DNA, 20 bp, Homo sapiens
  source 1..20: mol_type = genomic DNA
gaattacatttccctgggcg

SEQ ID NO: 1375 - DNA, 20 bp, Homo sapiens
  source 1..20: mol_type = genomic DNA
tgaaaccgtcttccttgtct

SEQ ID NO: 1376 - DNA, 20 bp, Homo sapiens
  source 1..20: mol_type = genomic DNA
tttaaagcagagcaggacct

SEQ ID NO: 1377 - DNA, 20 bp, Homo sapiens
  source 1..20: mol_type = genomic DNA
tttatgacacacagagcagc

SEQ ID NO: 1378 - DNA, 20 bp, Homo sapiens
  source 1..20: mol_type = genomic DNA
atgtgtttgaccctttccct

SEQ ID NO: 1379 - DNA, 21 bp, Homo sapiens
  source 1..21: mol_type = genomic DNA
atcctgaagttgttccacatc

SEQ ID NO: 1380 - DNA, 21 bp, Homo sapiens
  source 1..21: mol_type = genomic DNA
gaccctgctttgttactagga

SEQ ID NO: 1381 - DNA, 20 bp, Homo sapiens
  source 1..20: mol_type = genomic DNA
tggacatggacatttcaacg

SEQ ID NO: 1382 - DNA, 20 bp, Homo sapiens
  source 1..20: mol_type = genomic DNA
aaaaatgcttccacttgcct

SEQ ID NO: 1383 - DNA, 20 bp, Homo sapiens
  source 1..20: mol_type = genomic DNA
gcacctccaacaacattcaa

SEQ ID NO: 1384 - DNA, 18 bp, Homo sapiens
  source 1..18: mol_type = genomic DNA
ttggaaatggggctggag

SEQ ID NO: 1385 - DNA, 21 bp, Homo sapiens
  source 1..21: mol_type = genomic DNA
actggtctattgggggaaaat

SEQ ID NO: 1386 - DNA, 20 bp, Homo sapiens
  source 1..20: mol_type = genomic DNA
agtgttaggaaagcagagtg

SEQ ID NO: 1387 - DNA, 20 bp, Homo sapiens
  source 1..20: mol_type = genomic DNA
tggacagggtttcacaagat

SEQ ID NO: 1388 - DNA, 20 bp, Homo sapiens
  source 1..20: mol_type = genomic DNA
ctcctctccatctttccagg

SEQ ID NO: 1389 - DNA, 21 bp, Homo sapiens
  source 1..21: mol_type = genomic DNA
ataggctgacttccacatctc

SEQ ID NO: 1390 - DNA, 20 bp, Homo sapiens
  source 1..20: mol_type = genomic DNA
tgtgggggtcaattctaacg

SEQ ID NO: 1391 - DNA, 20 bp, Homo sapiens
  source 1..20: mol_type = genomic DNA
ccaacgggtagtggtagatt

SEQ ID NO: 1392 - DNA, 20 bp, Homo sapiens
  source 1..20: mol_type = genomic DNA
cttaccccacttcttcctga

SEQ ID NO: 1393 - DNA, 19 bp, Homo sapiens
  source 1..19: mol_type = genomic DNA
cctgtcacaactgcctttg

SEQ ID NO: 1394 - DNA, 20 bp, Homo sapiens
  source 1..20: mol_type = genomic DNA
tttgccattttgtgatgcca

SEQ ID NO: 1395 - DNA, 20 bp, Homo sapiens
  source 1..20: mol_type = genomic DNA
ggagtttcaggttggcagaa

SEQ ID NO: 1396 - DNA, 20 bp, Homo sapiens
  source 1..20: mol_type = genomic DNA
acagcttgcttcaaactaca

SEQ ID NO: 1397 - DNA, 20 bp, Homo sapiens
  source 1..20: mol_type = genomic DNA
ttgaaggggcaaaatacagc

SEQ ID NO: 1398 - DNA, 20 bp, Homo sapiens
  source 1..20: mol_type = genomic DNA
gccccaaattgtaacaaagc

SEQ ID NO: 1399 - DNA, 20 bp, Homo sapiens
  source 1..20: mol_type = genomic DNA
tgacgaagactccaacacaa

SEQ ID NO: 1400 - DNA, 20 bp, Homo sapiens
  source 1..20: mol_type = genomic DNA
aagtcagggaaatgaagctg

SEQ ID NO: 1401 - DNA, 20 bp, Homo sapiens
  source 1..20: mol_type = genomic DNA
gtaacacagtgctccttctc

SEQ ID NO: 1402 - DNA, 20 bp, Homo sapiens
  source 1..20: mol_type = genomic DNA
ggccccaattagctgatttc

SEQ ID NO: 1403 - DNA, 20 bp, Homo sapiens
  source 1..20: mol_type = genomic DNA
ctgagcagggaaaaatccag

SEQ ID NO: 1404 - DNA, 20 bp, Homo sapiens
  source 1..20: mol_type = genomic DNA
acaaaggattcaggtgcagt

SEQ ID NO: 1405 - DNA, 20 bp, Homo sapiens
  source 1..20: mol_type = genomic DNA
acaggttttgctcttcagga

SEQ ID NO: 1406 - DNA, 21 bp, Homo sapiens
  source 1..21: mol_type = genomic DNA
ggcaagtttgtctggttcatt

SEQ ID NO: 1407 - DNA, 20 bp, Homo sapiens
  source 1..20: mol_type = genomic DNA
ccatctgcatctgtctcctt

SEQ ID NO: 1408 - DNA, 19 bp, Homo sapiens
  source 1..19: mol_type = genomic DNA
gctcctctccttctccctt

SEQ ID NO: 1409 - DNA, 20 bp, Homo sapiens
  source 1..20: mol_type = genomic DNA
tgtataagggcaatcgtggt

SEQ ID NO: 1410 - DNA, 20 bp, Homo sapiens
  source 1..20: mol_type = genomic DNA
aaggaaccaggtcagacaag

SEQ ID NO: 1411 - DNA, 21 bp, Homo sapiens
  source 1..21: mol_type = genomic DNA
gttagaaggcaaacatcatgc

SEQ ID NO: 1412 - DNA, 20 bp, Homo sapiens
  source 1..20: mol_type = genomic DNA
tgcagtcataggaaaaggct

SEQ ID NO: 1413 - DNA, 19 bp, Homo sapiens
  source 1..19: mol_type = genomic DNA
gcagtcagaatggtttggc

SEQ ID NO: 1414 - DNA, 21 bp, Homo sapiens
  source 1..21: mol_type = genomic DNA
agacattggtttggttggttc

SEQ ID NO: 1415 - DNA, 20 bp, Homo sapiens
  source 1..20: mol_type = genomic DNA
acacaaatgaaagcccgtac

SEQ ID NO: 1416 - DNA, 20 bp, Homo sapiens
  source 1..20: mol_type = genomic DNA
ggtctgctgtttctctttgc

SEQ ID NO: 1417 - DNA, 20 bp, Homo sapiens
  source 1..20: mol_type = genomic DNA
agagccttaccaagctgaag

SEQ ID NO: 1418 - DNA, 20 bp, Homo sapiens
  source 1..20: mol_type = genomic DNA
gggatggttacttagtgggg

SEQ ID NO: 1419 - DNA, 20 bp, Homo sapiens
  source 1..20: mol_type = genomic DNA
ttacactcgccttccaaaca

SEQ ID NO: 1420 - DNA, 20 bp, Homo sapiens
  source 1..20: mol_type = genomic DNA
gagagaggaggagttggaag

SEQ ID NO: 1421 - DNA, 20 bp, Homo sapiens
  source 1..20: mol_type = genomic DNA
atccacgacatccaaaatca

SEQ ID NO: 1422 - DNA, 20 bp, Homo sapiens
  source 1..20: mol_type = genomic DNA
ttgtgcaagaagaaacctgc

SEQ ID NO: 1423 - DNA, 20 bp, Homo sapiens
  source 1..20: mol_type = genomic DNA
ggccttgcataaaccacatt

SEQ ID NO: 1424 - DNA, 20 bp, Homo sapiens
  source 1..20: mol_type = genomic DNA
tttgtaattggtcctcgcct

SEQ ID NO: 1425 - DNA, 20 bp, Homo sapiens
  source 1..20: mol_type = genomic DNA
caagtatttcatggcgctcc

SEQ ID NO: 1426 - DNA, 21 bp, Homo sapiens
  source 1..21: mol_type = genomic DNA
gtcaacagtatcagcttccaa

SEQ ID NO: 1427 - DNA, 20 bp, Homo sapiens
  source 1..20: mol_type = genomic DNA
tgggcttctttttcattccg

SEQ ID NO: 1428 - DNA, 20 bp, Homo sapiens
  source 1..20: mol_type = genomic DNA
tcaacaagctctctgttcac

SEQ ID NO: 1429 - DNA, 20 bp, Homo sapiens
  source 1..20: mol_type = genomic DNA
gtgcaaacagtgacctcaat

SEQ ID NO: 1430 - DNA, 20 bp, Homo sapiens
  source 1..20: mol_type = genomic DNA
gctgggctgctttaatttct

SEQ ID NO: 1431 - DNA, 20 bp, Homo sapiens
  source 1..20: mol_type = genomic DNA
ggaattgtggggtcaaatgg

SEQ ID NO: 1432 - DNA, 21 bp, Homo sapiens
  source 1..21: mol_type = genomic DNA
ctagtgcttctacctccagac

SEQ ID NO: 1433 - DNA, 20 bp, Homo sapiens
  source 1..20: mol_type = genomic DNA
aaccacacactaacagggaa

SEQ ID NO: 1434 - DNA, 20 bp, Homo sapiens
  source 1..20: mol_type = genomic DNA
tctagtttgccctctttccc

SEQ ID NO: 1435 - DNA, 20 bp, Homo sapiens
  source 1..20: mol_type = genomic DNA
cgaattgcttccttgctctg

SEQ ID NO: 1436 - DNA, 22 bp, Homo sapiens
  source 1..22: mol_type = genomic DNA
tctatcacagcaggaaatcact

SEQ ID NO: 1437 - DNA, 20 bp, Homo sapiens
  source 1..20: mol_type = genomic DNA
tcttcgtgtttctctagccc

SEQ ID NO: 1438 - DNA, 20 bp, Homo sapiens
  source 1..20: mol_type = genomic DNA
ttgaagagctaaagggggag

SEQ ID NO: 1439 - DNA, 20 bp, Homo sapiens
  source 1..20: mol_type = genomic DNA
tgtcaccgtactacctaagc

SEQ ID NO: 1440 - DNA, 19 bp, Homo sapiens
  source 1..19: mol_type = genomic DNA
agtacgctcctttgcagag

SEQ ID NO: 1441 - DNA, 20 bp, Homo sapiens
  source 1..20: mol_type = genomic DNA
ttacggggacacaaaatggt

SEQ ID NO: 1442 - DNA, 19 bp, Homo sapiens
  source 1..19: mol_type = genomic DNA
ctgtgctttgcccttgaag

SEQ ID NO: 1443 - DNA, 20 bp, Homo sapiens
  source 1..20: mol_type = genomic DNA
aagtcaacccatatgccact

SEQ ID NO: 1444 - DNA, 20 bp, Homo sapiens
  source 1..20: mol_type = genomic DNA
acattcaggctgtcacacat

SEQ ID NO: 1445 - DNA, 23 bp, Homo sapiens
  source 1..23: mol_type = genomic DNA
tcatgtcactagttttataaggc

SEQ ID NO: 1446 - DNA, 20 bp, Homo sapiens
  source 1..20: mol_type = genomic DNA
agtagtgaggctccaaagtg

SEQ ID NO: 1447 - DNA, 20 bp, Homo sapiens
  source 1..20: mol_type = genomic DNA
tgggaggagtttgctgttta

SEQ ID NO: 1448 - DNA, 20 bp, Homo sapiens
  source 1..20: mol_type = genomic DNA
ttctaagcctgtgactgaca

SEQ ID NO: 1449 - DNA, 20 bp, Homo sapiens
  source 1..20: mol_type = genomic DNA
tgaacctgactttccttggg

SEQ ID NO: 1450 - DNA, 20 bp, Homo sapiens
  source 1..20: mol_type = genomic DNA
gccattctatcatctcggga

SEQ ID NO: 1451 - DNA, 19 bp, Homo sapiens
  source 1..19: mol_type = genomic DNA
agtctctccctgaaaccca

SEQ ID NO: 1452 - DNA, 20 bp, Homo sapiens
  source 1..20: mol_type = genomic DNA
aagagttggcttggagttga

SEQ ID NO: 1453 - DNA, 21 bp, Homo sapiens
  source 1..21: mol_type = genomic DNA
cccacaattatgaaaggaggt

SEQ ID NO: 1454 - DNA, 20 bp, Homo sapiens
  source 1..20: mol_type = genomic DNA
ttgaccaggacaaatgagga

SEQ ID NO: 1455 - DNA, 20 bp, Homo sapiens
  source 1..20: mol_type = genomic DNA
cactttgttggtctgggtca

SEQ ID NO: 1456 - DNA, 20 bp, Homo sapiens
  source 1..20: mol_type = genomic DNA
gggactctaggtggggttaa

SEQ ID NO: 1457 - DNA, 20 bp, Homo sapiens
  source 1..20: mol_type = genomic DNA
gtttatgccttgggattgcc

SEQ ID NO: 1458 - DNA, 20 bp, Homo sapiens
  source 1..20: mol_type = genomic DNA
gtgtggtaaggatgctagga

SEQ ID NO: 1459 - DNA, 20 bp, Homo sapiens
  source 1..20: mol_type = genomic DNA
gaaagtgactcctccctgac

SEQ ID NO: 1460 - DNA, 20 bp, Homo sapiens
  source 1..20: mol_type = genomic DNA
ccaggttctgttctctgtca

SEQ ID NO: 1461 - DNA, 20 bp, Homo sapiens
  source 1..20: mol_type = genomic DNA
gtgagacatggttgctgttc

SEQ ID NO: 1462 - DNA, 20 bp, Homo sapiens
  source 1..20: mol_type = genomic DNA
ctttctcctgctccacctat

SEQ ID NO: 1463 - DNA, 20 bp, Homo sapiens
  source 1..20: mol_type = genomic DNA
ctatgtgtgttccaacccga

SEQ ID NO: 1464 - DNA, 20 bp, Homo sapiens
  source 1..20: mol_type = genomic DNA
gggaccttctaaccatgtgt

SEQ ID NO: 1465 - DNA, 20 bp, Homo sapiens
  source 1..20: mol_type = genomic DNA
cgggattttgaaaaggcaga

SEQ ID NO: 1466 - DNA, 20 bp, Homo sapiens
  source 1..20: mol_type = genomic DNA
gtgttgtctctcagctcctc

SEQ ID NO: 1467 - DNA, 20 bp, Homo sapiens
  source 1..20: mol_type = genomic DNA
gttctctggttaaggccctt

SEQ ID NO: 1468 - DNA, 20 bp, Homo sapiens
  source 1..20: mol_type = genomic DNA
cctcttcacctataagcccc

SEQ ID NO: 1469 - DNA, 20 bp, Homo sapiens
  source 1..20: mol_type = genomic DNA
taggggacagtaagccagat

SEQ ID NO: 1470 - DNA, 20 bp, Homo sapiens
  source 1..20: mol_type = genomic DNA
acgatggacctctgttgaac

SEQ ID NO: 1471 - DNA, 21 bp, Homo sapiens
  source 1..21: mol_type = genomic DNA
attcccatccatccatcactc

SEQ ID NO: 1472 - DNA, 20 bp, Homo sapiens
  source 1..20: mol_type = genomic DNA
tcgtttttggatggtggttg

SEQ ID NO: 1473 - DNA, 21 bp, Homo sapiens
  source 1..21: mol_type = genomic DNA
gaagttcctccagtagactca

SEQ ID NO: 1474 - DNA, 20 bp, Homo sapiens
  source 1..20: mol_type = genomic DNA
ttgtttgagtctgggaggaa

SEQ ID NO: 1475 - DNA, 20 bp, Homo sapiens
  source 1..20: mol_type = genomic DNA
aatactgtgagactgccacc

SEQ ID NO: 1476 - DNA, 20 bp, Homo sapiens
  source 1..20: mol_type = genomic DNA
cagtcacggaaagtaccctc

SEQ ID NO: 1477 - DNA, 20 bp, Homo sapiens
  source 1..20: mol_type = genomic DNA
accatgtttccctctgtcac

SEQ ID NO: 1478 - DNA, 20 bp, Homo sapiens
  source 1..20: mol_type = genomic DNA
ttaccaagggacaggatgga

SEQ ID NO: 1479 - DNA, 20 bp, Homo sapiens
  source 1..20: mol_type = genomic DNA
ccctagaggtcaaggtatgg

SEQ ID NO: 1480 - DNA, 20 bp, Homo sapiens
  source 1..20: mol_type = genomic DNA
ataggccctgtgtgttagtt

SEQ ID NO: 1481 - DNA, 20 bp, Homo sapiens
  source 1..20: mol_type = genomic DNA
agaaagtcccctccatttct

SEQ ID NO: 1482 - DNA, 20 bp, Homo sapiens
  source 1..20: mol_type = genomic DNA
gccaatgccaaagtcagtta

SEQ ID NO: 1483 - DNA, 20 bp, Homo sapiens
  source 1..20: mol_type = genomic DNA
gaggacgagttgaacaaagc

SEQ ID NO: 1484 - DNA, 21 bp, Homo sapiens
  source 1..21: mol_type = genomic DNA
atactggtctcaaggtagcac

SEQ ID NO: 1485 - DNA, 22 bp, Homo sapiens
  source 1..22: mol_type = genomic DNA
accaagtgaagctgagttaatg

SEQ ID NO: 1486 - DNA, 20 bp, Homo sapiens
  source 1..20: mol_type = genomic DNA
cccagatacactcctgcttc

SEQ ID NO: 1487 - DNA, 20 bp, Homo sapiens
  source 1..20: mol_type = genomic DNA
caaacatgagagggggagaa

SEQ ID NO: 1488 - DNA, 20 bp, Homo sapiens
  source 1..20: mol_type = genomic DNA
aaacacagcaatgaggaagg

SEQ ID NO: 1489 - DNA, 20 bp, Homo sapiens
  source 1..20: mol_type = genomic DNA
gatactcccctgtgttgctt

SEQ ID NO: 1490 - DNA, 20 bp, Homo sapiens
  source 1..20: mol_type = genomic DNA
gctcttactaggatggcagg

SEQ ID NO: 1491 - DNA, 20 bp, Homo sapiens
  source 1..20: mol_type = genomic DNA
gtttccagcagcaatccttt

SEQ ID NO: 1492 - DNA, 19 bp, Homo sapiens
  source 1..19: mol_type = genomic DNA
ctgtgcagaagggttagct

SEQ ID NO: 1493 - DNA, 20 bp, Homo sapiens
  source 1..20: mol_type = genomic DNA
aaacccctgctacccaaaat

SEQ ID NO: 1494 - DNA, 20 bp, Homo sapiens
  source 1..20: mol_type = genomic DNA
aatgcccagatgctgttttc

SEQ ID NO: 1495 - DNA, 21 bp, Homo sapiens
  source 1..21: mol_type = genomic DNA
gagtggttgttctctccagat

SEQ ID NO: 1496 - DNA, 20 bp, Homo sapiens
  source 1..20: mol_type = genomic DNA
cagtctagaagctcacccag

SEQ ID NO: 1497 - DNA, 20 bp, Homo sapiens
  source 1..20: mol_type = genomic DNA
tctcctctacccctacactg

SEQ ID NO: 1498 - DNA, 20 bp, Homo sapiens
  source 1..20: mol_type = genomic DNA
ggtgtaaatgtggcctctcc

SEQ ID NO: 1499 - DNA, 20 bp, Homo sapiens
  source 1..20: mol_type = genomic DNA
acaaagctacaaactctggc

SEQ ID NO: 1500 - DNA, 20 bp, Homo sapiens
  source 1..20: mol_type = genomic DNA
tttcactgggagactgatgc

SEQ ID NO: 1501 - DNA, 20 bp, Homo sapiens
  source 1..20: mol_type = genomic DNA
ctgttctgttcctgaggcta

SEQ ID NO: 1502 - DNA, 21 bp, Homo sapiens
  source 1..21: mol_type = genomic DNA
tgtgtatccattgcctcatct

SEQ ID NO: 1503 - DNA, 20 bp, Homo sapiens
  source 1..20: mol_type = genomic DNA
gaagagggtgtgtgtaggac

SEQ ID NO: 1504 - DNA, 20 bp, Homo sapiens
  source 1..20: mol_type = genomic DNA
tggttgctcttcctagttcc

SEQ ID NO: 1505 - DNA, 20 bp, Homo sapiens
  source 1..20: mol_type = genomic DNA
caatgtggaggaagctcttg

SEQ ID NO: 1506 - DNA, 20 bp, Homo sapiens
  source 1..20: mol_type = genomic DNA
ttgcacacccaatatgctac

SEQ ID NO: 1507 - DNA, 20 bp, Homo sapiens
  source 1..20: mol_type = genomic DNA
tccaaggtttctctagcgac

SEQ ID NO: 1508 - DNA, 20 bp, Homo sapiens
  source 1..20: mol_type = genomic DNA
tcgctattctccttgccata

SEQ ID NO: 1509 - DNA, 20 bp, Homo sapiens
  source 1..20: mol_type = genomic DNA
aacagcctctttccttagca

SEQ ID NO: 1510 - DNA, 20 bp, Homo sapiens
  source 1..20: mol_type = genomic DNA
tttttggctcagtgggatgt

SEQ ID NO: 1511 - DNA, 21 bp, Homo sapiens
  source 1..21: mol_type = genomic DNA
ctgttcattcttcttcagggc

SEQ ID NO: 1512 - DNA, 20 bp, Homo sapiens
  source 1..20: mol_type = genomic DNA
ttcccgagcccataaactac

SEQ ID NO: 1513 - DNA, 20 bp, Homo sapiens
  source 1..20: mol_type = genomic DNA
tgctcagatttcagcttcct

SEQ ID NO: 1514 - DNA, 20 bp, Homo sapiens
  source 1..20: mol_type = genomic DNA
gtcagcgatgtggatgtcta

SEQ ID NO: 1515 - DNA, 20 bp, Homo sapiens
  source 1..20: mol_type = genomic DNA
aactgactccatgacctgtg

SEQ ID NO: 1516 - DNA, 20 bp, Homo sapiens
  source 1..20: mol_type = genomic DNA
gaagctgctacttggtgaac

SEQ ID NO: 1517 - DNA, 20 bp, Homo sapiens
  source 1..20: mol_type = genomic DNA
ttttcctcctgttctgttgc

SEQ ID NO: 1518 - DNA, 20 bp, Homo sapiens
  source 1..20: mol_type = genomic DNA
ttctcaaatgcaaccactcc

SEQ ID NO: 1519 - DNA, 20 bp, Homo sapiens
  source 1..20: mol_type = genomic DNA
ctggcccttcaatttcatgc

SEQ ID NO: 1520 - DNA, 21 bp, Homo sapiens
  source 1..21: mol_type = genomic DNA
ccagcagtaccgatatcagag

SEQ ID NO: 1521 - DNA, 20 bp, Homo sapiens
  source 1..20: mol_type = genomic DNA
cagaaggcaggagatggatt

SEQ ID NO: 1522 - DNA, 20 bp, Homo sapiens
  source 1..20: mol_type = genomic DNA
aagcaaccattttcctgagc

SEQ ID NO: 1523 - DNA, 20 bp, Homo sapiens
  source 1..20: mol_type = genomic DNA
tcacccttcatctacccact

SEQ ID NO: 1524 - DNA, 20 bp, Homo sapiens
  source 1..20: mol_type = genomic DNA
aagctggtgaccttctacag

SEQ ID NO: 1525 - DNA, 20 bp, Homo sapiens
  source 1..20: mol_type = genomic DNA
aaaattctggttggggagga

SEQ ID NO: 1526 - DNA, 20 bp, Homo sapiens
  source 1..20: mol_type = genomic DNA
ccatacctcatctgctctgt

SEQ ID NO: 1527 - DNA, 20 bp, Homo sapiens
  source 1..20: mol_type = genomic DNA
ggctgtccctgaactacttt

SEQ ID NO: 1528 - DNA, 20 bp, Homo sapiens
  source 1..20: mol_type = genomic DNA
cttggcttaaactctgctcc

SEQ ID NO: 1529 - DNA, 20 bp, Homo sapiens
  source 1..20: mol_type = genomic DNA
gacttgaacacaccctcaga

SEQ ID NO: 1530 - DNA, 20 bp, Homo sapiens
  source 1..20: mol_type = genomic DNA
aggagaagagaccattgcag

SEQ ID NO: 1531 - DNA, 20 bp, Homo sapiens
  source 1..20: mol_type = genomic DNA
ttagctaagtctgtgcggag

SEQ ID NO: 1532 - DNA, 19 bp, Homo sapiens
  source 1..19: mol_type = genomic DNA
gaagcaacactgtacacgc

SEQ ID NO: 1533 - DNA, 20 bp, Homo sapiens
  source 1..20: mol_type = genomic DNA
tctgataaaggctggctcat

SEQ ID NO: 1534 - DNA, 20 bp, Homo sapiens
  source 1..20: mol_type = genomic DNA
taaaacagtgccgctacttc

SEQ ID NO: 1535 - DNA, 20 bp, Homo sapiens
  source 1..20: mol_type = genomic DNA
agtgctatgagtcttggtcc

SEQ ID NO: 1536 - DNA, 20 bp, Homo sapiens
  source 1..20: mol_type = genomic DNA
ggaaaacatgcggtggtcta

SEQ ID NO: 1537 - DNA, 20 bp, Homo sapiens
  source 1..20: mol_type = genomic DNA
gcagagaaatgggttaaggg

SEQ ID NO: 1538 - DNA, 20 bp, Homo sapiens
  source 1..20: mol_type = genomic DNA
ggtagaggtgggttatctgt

SEQ ID NO: 1539 - DNA, 19 bp, Homo sapiens
  source 1..19: mol_type = genomic DNA
ctgtaaatctccgggggtg

SEQ ID NO: 1540 - DNA, 20 bp, Homo sapiens
  source 1..20: mol_type = genomic DNA
ggcgagaatggagagagaaa

SEQ ID NO: 1541 - DNA, 20 bp, Homo sapiens
  source 1..20: mol_type = genomic DNA
tcccaagccaggattctttt

SEQ ID NO: 1542 - DNA, 20 bp, Homo sapiens
  source 1..20: mol_type = genomic DNA
gaacaagtacaaccgtgcag

SEQ ID NO: 1543 - DNA, 20 bp, Homo sapiens
  source 1..20: mol_type = genomic DNA
acaaatgccccatatcaacc

SEQ ID NO: 1544 - DNA, 20 bp, Homo sapiens
  source 1..20: mol_type = genomic DNA
ggaaagaggcctggagtaat

SEQ ID NO: 1545 - DNA, 20 bp, Homo sapiens
  source 1..20: mol_type = genomic DNA
tttccactggatgtcgtcat

SEQ ID NO: 1546 - DNA, 20 bp, Homo sapiens
  source 1..20: mol_type = genomic DNA
aggacaaagtttcagcctct

SEQ ID NO: 1547 - DNA, 21 bp, Homo sapiens
  source 1..21: mol_type = genomic DNA
actcaggacacgacttcatac

SEQ ID NO: 1548 - DNA, 20 bp, Homo sapiens
  source 1..20: mol_type = genomic DNA
acatctttggctcactggtt

SEQ ID NO: 1549 - DNA, 20 bp, Homo sapiens
  source 1..20: mol_type = genomic DNA
tcacagtgggcttcattcag

SEQ ID NO: 1550 - DNA, 22 bp, Homo sapiens
  source 1..22: mol_type = genomic DNA
agctggaatctatgtaggatgg

SEQ ID NO: 1551 - DNA, 20 bp, Homo sapiens
  source 1..20: mol_type = genomic DNA
ctgcggaaggatctagtctt

SEQ ID NO: 1552 - DNA, 22 bp, Homo sapiens
  source 1..22: mol_type = genomic DNA
tgagaagtattcagcatttccc

SEQ ID NO: 1553 - DNA, 19 bp, Homo sapiens
  source 1..19: mol_type = genomic DNA
cactcacggacttttaggc

SEQ ID NO: 1554 - DNA, 18 bp, Homo sapiens
  source 1..18: mol_type = genomic DNA
aaaaaaaaaaaaaaaaaa

SEQ ID NO: 1555 - DNA, 20 bp, Homo sapiens
  source 1..20: mol_type = genomic DNA
tcacacgccaggttattaca

SEQ ID NO: 1556 - DNA, 20 bp, Homo sapiens
  source 1..20: mol_type = genomic DNA
aagtgggtttgcagtttgga

SEQ ID NO: 1557 - DNA, 20 bp, Homo sapiens
  source 1..20: mol_type = genomic DNA
atgtacgtgtgtgtccatgt

SEQ ID NO: 1558 - DNA, 20 bp, Homo sapiens
  source 1..20: mol_type = genomic DNA
aggcgggttggtcaataata

SEQ ID NO: 1559 - DNA, 20 bp, Homo sapiens
  source 1..20: mol_type = genomic DNA
ccacaaatcccatcaacaca

SEQ ID NO: 1560 - DNA, 20 bp, Homo sapiens
  source 1..20: mol_type = genomic DNA
tttcacagtaacatcggcac

SEQ ID NO: 1561 - DNA, 20 bp, Homo sapiens
  source 1..20: mol_type = genomic DNA
ctgacagcctgcatttgatt

SEQ ID NO: 1562 - DNA, 21 bp, Homo sapiens
  source 1..21: mol_type = genomic DNA
tttcctggagtaaagcgatct

SEQ ID NO: 1563 - DNA, 20 bp, Homo sapiens
  source 1..20: mol_type = genomic DNA
cccacaatcacccatctcta

SEQ ID NO: 1564 - DNA, 20 bp, Homo sapiens
  source 1..20: mol_type = genomic DNA
tatctcactccacagcttcc

SEQ ID NO: 1565 - DNA, 20 bp, Homo sapiens
  source 1..20: mol_type = genomic DNA
acaggtagtttggtggtgtc

SEQ ID NO: 1566 - DNA, 20 bp, Homo sapiens
  source 1..20: mol_type = genomic DNA
gctgttgaatgccagaactt

SEQ ID NO: 1567 - DNA, 20 bp, Homo sapiens
  source 1..20: mol_type = genomic DNA
atagggtcggttttggtctg

SEQ ID NO: 1568 - DNA, 20 bp, Homo sapiens
  source 1..20: mol_type = genomic DNA
catcatccctgtcattccca

SEQ ID NO: 1569 - DNA, 20 bp, Homo sapiens
  source 1..20: mol_type = genomic DNA
gtgggctaagaaaacacctc

SEQ ID NO: 1570 - DNA, 20 bp, Homo sapiens
  source 1..20: mol_type = genomic DNA
attgtggtttgtggcatgtg

SEQ ID NO: 1571 - DNA, 20 bp, Homo sapiens
  source 1..20: mol_type = genomic DNA
ccagattcagcctgtattcc

SEQ ID NO: 1572 - DNA, 20 bp, Homo sapiens
  source 1..20: mol_type = genomic DNA
gcccatggaagtaaacagtc

SEQ ID NO: 1573 - DNA, 22 bp, Homo sapiens
  source 1..22: mol_type = genomic DNA
aggtttgacataatagtgctgc

SEQ ID NO: 1574 - DNA, 20 bp, Homo sapiens
  source 1..20: mol_type = genomic DNA
aatcctttccccactcactg

SEQ ID NO: 1575 - DNA, 20 bp, Homo sapiens
  source 1..20: mol_type = genomic DNA
cacaaagcagttccatgtcc

SEQ ID NO: 1576 - DNA, 20 bp, Homo sapiens
  source 1..20: mol_type = genomic DNA
ggacaatttctcacttgcca

SEQ ID NO: 1577 - DNA, 20 bp, Homo sapiens
  source 1..20: mol_type = genomic DNA
aaggggtgttgttagatgct

SEQ ID NO: 1578 - DNA, 20 bp, Homo sapiens
  source 1..20: mol_type = genomic DNA
gcatcacacacagcagatac

SEQ ID NO: 1579 - DNA, 20 bp, Homo sapiens
  source 1..20: mol_type = genomic DNA
aaaatgtccgtcccagatga

SEQ ID NO: 1580 - DNA, 20 bp, Homo sapiens
  source 1..20: mol_type = genomic DNA
gggggaaaatgtgttgtgtt

SEQ ID NO: 1581 - DNA, 20 bp, Homo sapiens
  source 1..20: mol_type = genomic DNA
aactgttagcttctccaccc

SEQ ID NO: 1582 - DNA, 20 bp, Homo sapiens
  source 1..20: mol_type = genomic DNA
cgagtgtaggttccggttta

SEQ ID NO: 1583 - DNA, 20 bp, Homo sapiens
  source 1..20: mol_type = genomic DNA
agaatgcccatttcaggagt

SEQ ID NO: 1584 - DNA, 21 bp, Homo sapiens
  source 1..21: mol_type = genomic DNA
atatgtggtttgaggtcagct

SEQ ID NO: 1585 - DNA, 19 bp, Homo sapiens
  source 1..19: mol_type = genomic DNA
ggctttggtcacatggaga

SEQ ID NO: 1586 - DNA, 20 bp, Homo sapiens
  source 1..20: mol_type = genomic DNA
tgaggcaagattcagtgact

SEQ ID NO: 1587 - DNA, 20 bp, Homo sapiens
  source 1..20: mol_type = genomic DNA
acttcatcttgacagcagct

SEQ ID NO: 1588 - DNA, 22 bp, Homo sapiens
  source 1..22: mol_type = genomic DNA
cacttcctcatgatgttttgga

SEQ ID NO: 1589 - DNA, 20 bp, Homo sapiens
  source 1..20: mol_type = genomic DNA
ggccagcccacttatttttg

SEQ ID NO: 1590 - DNA, 20 bp, Homo sapiens
  source 1..20: mol_type = genomic DNA
ctcagggtggagtttcaaac

SEQ ID NO: 1591 - DNA, 20 bp, Homo sapiens
  source 1..20: mol_type = genomic DNA
gatctttcttcccctcctcc

SEQ ID NO: 1592 - DNA, 21 bp, Homo sapiens
  source 1..21: mol_type = genomic DNA
tgtacatccaccacttgtttg

SEQ ID NO: 1593 - DNA, 20 bp, Homo sapiens
  source 1..20: mol_type = genomic DNA
agcggtagtaagaaggcaaa

SEQ ID NO: 1594 - DNA, 20 bp, Homo sapiens
  source 1..20: mol_type = genomic DNA
agacaggtgaccattttccc

SEQ ID NO: 1595 - DNA, 20 bp, Homo sapiens
  source 1..20: mol_type = genomic DNA
tgtggaacttttgagccaga

SEQ ID NO: 1596 - DNA, 21 bp, Homo sapiens
  source 1..21: mol_type = genomic DNA
cataacgaaatagggccttcc

SEQ ID NO: 1597 - DNA, 21 bp, Homo sapiens
  source 1..21: mol_type = genomic DNA
atttctgcctcttctcttccc

SEQ ID NO: 1598 - DNA, 20 bp, Homo sapiens
  source 1..20: mol_type = genomic DNA
tcatcaagtcacctctccac

SEQ ID NO: 1599 - DNA, 20 bp, Homo sapiens
  source 1..20: mol_type = genomic DNA
tggaaaactagacagcagcc

SEQ ID NO: 1600 - DNA, 20 bp, Homo sapiens
  source 1..20: mol_type = genomic DNA
ggaaaggggaaaaggtgaca

SEQ ID NO: 1601 - DNA, 20 bp, Homo sapiens
  source 1..20: mol_type = genomic DNA
ctgtcctctgtcccacataa

SEQ ID NO: 1602 - DNA, 20 bp, Homo sapiens
  source 1..20: mol_type = genomic DNA
tttctgagtccattccccat

SEQ ID NO: 1603 - DNA, 20 bp, Homo sapiens
  source 1..20: mol_type = genomic DNA
ggccatcctgatatcttcca

SEQ ID NO: 1604 - DNA, 20 bp, Homo sapiens
  source 1..20: mol_type = genomic DNA
cagagagatgcagaggttca

SEQ ID NO: 1605 - DNA, 20 bp, Homo sapiens
  source 1..20: mol_type = genomic DNA
tgtgtgtgagctagctgaat

SEQ ID NO: 1606 - DNA, 20 bp, Homo sapiens
  source 1..20: mol_type = genomic DNA
ggtttcccatcctaccacat

SEQ ID NO: 1607 - DNA, 20 bp, Homo sapiens
  source 1..20: mol_type = genomic DNA
ggtgcttttgttgccttact

SEQ ID NO: 1608 - DNA, 20 bp, Homo sapiens
  source 1..20: mol_type = genomic DNA
actagaaagcagggtacagt

SEQ ID NO: 1609 - DNA, 20 bp, Homo sapiens
  source 1..20: mol_type = genomic DNA
gctttttccaacttctgctg

SEQ ID NO: 1610 - DNA, 20 bp, Homo sapiens
  source 1..20: mol_type = genomic DNA
caacagacaagtcacctcct

SEQ ID NO: 1611 - DNA, 20 bp, Homo sapiens
  source 1..20: mol_type = genomic DNA
ggttcttcctggacttcaaa

SEQ ID NO: 1612 - DNA, 21 bp, Homo sapiens
  source 1..21: mol_type = genomic DNA
gaaagcagtagtttcaggtgt

SEQ ID NO: 1613 - DNA, 20 bp, Homo sapiens
  source 1..20: mol_type = genomic DNA
tgaaagactctgttgccatg

SEQ ID NO: 1614 - DNA, 20 bp, Homo sapiens
  source 1..20: mol_type = genomic DNA
cactacacgctcagaacaaa

SEQ ID NO: 1615 - DNA, 20 bp, Homo sapiens
  source 1..20: mol_type = genomic DNA
aaggcaagcaataatgaggc

SEQ ID NO: 1616 - DNA, 21 bp, Homo sapiens
  source 1..21: mol_type = genomic DNA
ggacagtctgtgaaaattgct

SEQ ID NO: 1617 - DNA, 20 bp, Homo sapiens
  source 1..20: mol_type = genomic DNA
acaaacaacccttaatgccc

SEQ ID NO: 1618 - DNA, 20 bp, Homo sapiens
  source 1..20: mol_type = genomic DNA
tgaaacagtgaatccgcaat

SEQ ID NO: 1619 - DNA, 21 bp, Homo sapiens
  source 1..21: mol_type = genomic DNA
aagggaaatgtggatgcagta

SEQ ID NO: 1620 - DNA, 19 bp, Homo sapiens
  source 1..19: mol_type = genomic DNA
ttgaagggaagcggaaagt

SEQ ID NO: 1621 - DNA, 21 bp, Homo sapiens
  source 1..21: mol_type = genomic DNA
atttccagctaatgatgctcc

SEQ ID NO: 1622 - DNA, 20 bp, Homo sapiens
  source 1..20: mol_type = genomic DNA
gctcacttacgcattaacca

SEQ ID NO: 1623 - DNA, 20 bp, Homo sapiens
  source 1..20: mol_type = genomic DNA
acaggcaaaattcagttgga

SEQ ID NO: 1624 - DNA, 20 bp, Homo sapiens
  source 1..20: mol_type = genomic DNA
aggctgaatcacgtcaaaac

SEQ ID NO: 1625 - DNA, 19 bp, Homo sapiens
  source 1..19: mol_type = genomic DNA
cctcgttcacatttgacgc

SEQ ID NO: 1626 - DNA, 20 bp, Homo sapiens
  source 1..20: mol_type = genomic DNA
tgtctgggttcaactgtttg

SEQ ID NO: 1627 - DNA, 20 bp, Homo sapiens
  source 1..20: mol_type = genomic DNA
attttgcatgcctgttgaga

SEQ ID NO: 1628 - DNA, 20 bp, Homo sapiens
  source 1..20: mol_type = genomic DNA
gctctcctcaaaacccaagt

SEQ ID NO: 1629 - DNA, 20 bp, Homo sapiens
  source 1..20: mol_type = genomic DNA
cttaatgagggggcacaaag

SEQ ID NO: 1630 - DNA, 20 bp, Homo sapiens
  source 1..20: mol_type = genomic DNA
ttttcgtccagtcttccacc

SEQ ID NO: 1631 - DNA, 20 bp, Homo sapiens
  source 1..20: mol_type = genomic DNA
tacaggaccgtcagtgagag

SEQ ID NO: 1632 - DNA, 20 bp, Homo sapiens
  source 1..20: mol_type = genomic DNA
ttagctactgacgcttcacc

SEQ ID NO: 1633 - DNA, 20 bp, Homo sapiens
  source 1..20: mol_type = genomic DNA
gcacagacaacatgctagtt

SEQ ID NO: 1634 - DNA, 20 bp, Homo sapiens
  source 1..20: mol_type = genomic DNA
ttagtctgttcactggcaca

SEQ ID NO: 1635 - DNA, 19 bp, Homo sapiens
  source 1..19: mol_type = genomic DNA
cttatcagcagggcacagt

SEQ ID NO: 1636 - DNA, 20 bp, Homo sapiens
  source 1..20: mol_type = genomic DNA
ttgcatcaaacaaagccaca

SEQ ID NO: 1637 - DNA, 20 bp, Homo sapiens
  source 1..20: mol_type = genomic DNA
gagagacaagtcaccccttc

SEQ ID NO: 1638 - DNA, 20 bp, Homo sapiens
  source 1..20: mol_type = genomic DNA
agtcaactacaaatggggga

SEQ ID NO: 1639 - DNA, 20 bp, Homo sapiens
  source 1..20: mol_type = genomic DNA
gtgccaaaatcaacgaaagc

SEQ ID NO: 1640 - DNA, 21 bp, Homo sapiens
  source 1..21: mol_type = genomic DNA
aaggagggagtacaaagtgag

SEQ ID NO: 1641 - DNA, 20 bp, Homo sapiens
  source 1..20: mol_type = genomic DNA
atcacattttcagcacgagg

SEQ ID NO: 1642 - DNA, 20 bp, Homo sapiens
  source 1..20: mol_type = genomic DNA
cagggagggatgatttggaa

SEQ ID NO: 1643 - DNA, 20 bp, Homo sapiens
  source 1..20: mol_type = genomic DNA
agaactgagaggggagcata

SEQ ID NO: 1644 - DNA, 20 bp, Homo sapiens
  source 1..20: mol_type = genomic DNA
cagtcaccaacaaaggcttt

SEQ ID NO: 1645 - DNA, 20 bp, Homo sapiens
  source 1..20: mol_type = genomic DNA
tccccatctccctaactcat

SEQ ID NO: 1646 - DNA, 20 bp, Homo sapiens
  source 1..20: mol_type = genomic DNA
tttttctgctgcatccaagg

SEQ ID NO: 1647 - DNA, 20 bp, Homo sapiens
  source 1..20: mol_type = genomic DNA
actgtacgccatgaaaaaca

SEQ ID NO: 1648 - DNA, 20 bp, Homo sapiens
  source 1..20: mol_type = genomic DNA
ggcaaatcaagtgagctgac

SEQ ID NO: 1649 - DNA, 20 bp, Homo sapiens
  source 1..20: mol_type = genomic DNA
cgtgggtggagaatttcaca

SEQ ID NO: 1650 - DNA, 20 bp, Homo sapiens
  source 1..20: mol_type = genomic DNA
acttaggtcagttgcttggt

SEQ ID NO: 1651 - DNA, 20 bp, Homo sapiens
  source 1..20: mol_type = genomic DNA
gacttcatcagcacgtactt

SEQ ID NO: 1652 - DNA, 20 bp, Homo sapiens
  source 1..20: mol_type = genomic DNA
tgcaggcaaaattagcatgg

SEQ ID NO: 1653 - DNA, 20 bp, Homo sapiens
  source 1..20: mol_type = genomic DNA
gacttatctgctttcacccc

SEQ ID NO: 1654 - DNA, 20 bp, Homo sapiens
  source 1..20: mol_type = genomic DNA
ccccatgaacctaagaccat

SEQ ID NO: 1655 - DNA, 20 bp, Homo sapiens
  source 1..20: mol_type = genomic DNA
tctggacatgtctttgcgta

SEQ ID NO: 1656 - DNA, 20 bp, Homo sapiens
  source 1..20: mol_type = genomic DNA
ctccaggacatctcagcaat

SEQ ID NO: 1657 - DNA, 20 bp, Homo sapiens
  source 1..20: mol_type = genomic DNA
cctctcgtgtgggaaatgta

SEQ ID NO: 1658 - DNA, 20 bp, Homo sapiens
  source 1..20: mol_type = genomic DNA
tatctctggctacctcctgt

SEQ ID NO: 1659 - DNA, 19 bp, Homo sapiens
  source 1..19: mol_type = genomic DNA
ccccatccctgtaccaaag

SEQ ID NO: 1660 - DNA, 20 bp, Homo sapiens
  source 1..20: mol_type = genomic DNA
ctgcagagatattccatggc

SEQ ID NO: 1661 - DNA, 20 bp, Homo sapiens
  source 1..20: mol_type = genomic DNA
aaagctgggttcttaggctt

SEQ ID NO: 1662 - DNA, 20 bp, Homo sapiens
  source 1..20: mol_type = genomic DNA
gctgttttaggggcacattt

SEQ ID NO: 1663 - DNA, 20 bp, Homo sapiens
  source 1..20: mol_type = genomic DNA
aagaggcaatgtggaggtta

SEQ ID NO: 1664 - DNA, 21 bp, Homo sapiens
  source 1..21: mol_type = genomic DNA
gcccaaacaatctgcctttta

SEQ ID NO: 1665 - DNA, 20 bp, Homo sapiens
  source 1..20: mol_type = genomic DNA
tggcttcaaataactgggct

SEQ ID NO: 1666 - DNA, 20 bp, Homo sapiens
  source 1..20: mol_type = genomic DNA
agagcacacagaacagaact

SEQ ID NO: 1667 - DNA, 20 bp, Homo sapiens
  source 1..20: mol_type = genomic DNA
ctggtggatttctcgtcaga

SEQ ID NO: 1668 - DNA, 20 bp, Homo sapiens
  source 1..20: mol_type = genomic DNA
taggtgtttgtgtgaggctt

SEQ ID NO: 1669 - DNA, 20 bp, Homo sapiens
  source 1..20: mol_type = genomic DNA
gcctcactgctcctatcttt

SEQ ID NO: 1670 - DNA, 19 bp, Homo sapiens
  source 1..19: mol_type = genomic DNA
ctctagcagctgttcctcc

SEQ ID NO: 1671 - DNA, 20 bp, Homo sapiens
  source 1..20: mol_type = genomic DNA
cgtcgtatctctggctttgt

SEQ ID NO: 1672 - DNA, 20 bp, Homo sapiens
  source 1..20: mol_type = genomic DNA
gtccccaacctcatctttca

SEQ ID NO: 1673 - DNA, 20 bp, Homo sapiens
  source 1..20: mol_type = genomic DNA
tcttcaaagatggctgcaaa

SEQ ID NO: 1674 - DNA, 21 bp, Homo sapiens
  source 1..21: mol_type = genomic DNA
agtataaccagatagccgtgc

SEQ ID NO: 1675 - DNA, 20 bp, Homo sapiens
  source 1..20: mol_type = genomic DNA
tgtcctcagggcaataaagt

SEQ ID NO: 1676 - DNA, 20 bp, Homo sapiens
  source 1..20: mol_type = genomic DNA
tttgctgcttgaagtggaac

SEQ ID NO: 1677 - DNA, 20 bp, Homo sapiens
  source 1..20: mol_type = genomic DNA
gctgcaatgacctgatttct

SEQ ID NO: 1678 - DNA, 20 bp, Homo sapiens
  source 1..20: mol_type = genomic DNA
tccctctctcctccaaatga

SEQ ID NO: 1679 - DNA, 21 bp, Homo sapiens
  source 1..21: mol_type = genomic DNA
tgccacagtaggtataggttg

SEQ ID NO: 1680 - DNA, 20 bp, Homo sapiens
  source 1..20: mol_type = genomic DNA
ccctcgccctaaagaaacta

SEQ ID NO: 1681 - DNA, 20 bp, Homo sapiens
  source 1..20: mol_type = genomic DNA
cccctgaatccctacctcat

SEQ ID NO: 1682 - DNA, 21 bp, Homo sapiens
  source 1..21: mol_type = genomic DNA
tgttgtacaagtgagccattc

SEQ ID NO: 1683 - DNA, 21 bp, Homo sapiens
  source 1..21: mol_type = genomic DNA
accaagcaatcaactcactct

SEQ ID NO: 1684 - DNA, 21 bp, Homo sapiens
  source 1..21: mol_type = genomic DNA
gcccaatttgtctagccaata

SEQ ID NO: 1685 - DNA, 21 bp, Homo sapiens
  source 1..21: mol_type = genomic DNA
ctactgatcccaaagaaggca

SEQ ID NO: 1686 - DNA, 21 bp, Homo sapiens
  source 1..21: mol_type = genomic DNA
gtgaaaggttctatctgccaa

SEQ ID NO: 1687 - DNA, 21 bp, Homo sapiens
  source 1..21: mol_type = genomic DNA
ggcataccgagcatacataga

SEQ ID NO: 1688 - DNA, 21 bp, Homo sapiens
  source 1..21: mol_type = genomic DNA
cacctgtttcaccaaatcact

SEQ ID NO: 1689 - DNA, 21 bp, Homo sapiens
  source 1..21: mol_type = genomic DNA
tctcatgctctgacagacaag

SEQ ID NO: 1690 - DNA, 21 bp, Homo sapiens
  source 1..21: mol_type = genomic DNA
ttgtcctgtttctcttgtgac

SEQ ID NO: 1691 - DNA, 21 bp, Homo sapiens
  source 1..21: mol_type = genomic DNA
cacaggactgcatgcctatta

SEQ ID NO: 1692 - DNA, 21 bp, Homo sapiens
  source 1..21: mol_type = genomic DNA
gactctctcagcatcgagttt

SEQ ID NO: 1693 - DNA, 21 bp, Homo sapiens
  source 1..21: mol_type = genomic DNA
ctgatggaagggcattatcca

SEQ ID NO: 1694 - DNA, 22 bp, Homo sapiens
  source 1..22: mol_type = genomic DNA
ttctggttccataaatccatgc

SEQ ID NO: 1695 - DNA, 22 bp, Homo sapiens
  source 1..22: mol_type = genomic DNA
gggattattgttggctactgag

SEQ ID NO: 1696 - DNA, 21 bp, Homo sapiens
  source 1..21: mol_type = genomic DNA
aattggtgacctagggatcag

SEQ ID NO: 1697 - DNA, 21 bp, Homo sapiens
  source 1..21: mol_type = genomic DNA
gggtttggtaagggagaatga

SEQ ID NO: 1698 - DNA, 23 bp, Homo sapiens
  source 1..23: mol_type = genomic DNA
aagacatcccagttatgcattgt

SEQ ID NO: 1699 - DNA, 21 bp, Homo sapiens
  source 1..21: mol_type = genomic DNA
agatgggagggagattagaca

SEQ ID NO: 1700 - DNA, 21 bp, Homo sapiens
  source 1..21: mol_type = genomic DNA
gagtagcaacaacacatggag

SEQ ID NO: 1701 - DNA, 21 bp, Homo sapiens
  source 1..21: mol_type = genomic DNA
ttctccttcattagccacaca

SEQ ID NO: 1702 - DNA, 21 bp, Homo sapiens
  source 1..21: mol_type = genomic DNA
agtctgcactgtactcttctg

SEQ ID NO: 1703 - DNA, 21 bp, Homo sapiens
  source 1..21: mol_type = genomic DNA
acaaatggttcatgatggtgg

SEQ ID NO: 1704 - DNA, 21 bp, Homo sapiens
  source 1..21: mol_type = genomic DNA
ggtactcacgtttcagtttcc

SEQ ID NO: 1705 - DNA, 21 bp, Homo sapiens
  source 1..21: mol_type = genomic DNA
gttcatttctacagtccaggc

SEQ ID NO: 1706 - DNA, 21 bp, Homo sapiens
  source 1..21: mol_type = genomic DNA
ctctcactgtgctgcttaaag

SEQ ID NO: 1707 - DNA, 22 bp, Homo sapiens
  source 1..22: mol_type = genomic DNA
caaagaattccacagagatggg

SEQ ID NO: 1708 - DNA, 21 bp, Homo sapiens
  source 1..21: mol_type = genomic DNA
tgagctacagacaagattgca

SEQ ID NO: 1709 - DNA, 21 bp, Homo sapiens
  source 1..21: mol_type = genomic DNA
tcacatgggatcgacatatgc

SEQ ID NO: 1710 - DNA, 21 bp, Homo sapiens
  source 1..21: mol_type = genomic DNA
ccacacaatttcctggctatg

SEQ ID NO: 1711 - DNA, 21 bp, Homo sapiens
  source 1..21: mol_type = genomic DNA
tcttgcttctggagagttctt

SEQ ID NO: 1712 - DNA, 21 bp, Homo sapiens
  source 1..21: mol_type = genomic DNA
aggttatgcagacttcaggaa

SEQ ID NO: 1713 - DNA, 21 bp, Homo sapiens
  source 1..21: mol_type = genomic DNA
aagccaattctgcctctctag

SEQ ID NO: 1714 - DNA, 21 bp, Homo sapiens
  source 1..21: mol_type = genomic DNA
tcccttccttattctggcaac

SEQ ID NO: 1715 - DNA, 21 bp, Homo sapiens
  source 1..21: mol_type = genomic DNA
gcttcaaacactctaaagggc

SEQ ID NO: 1716 - DNA, 21 bp, Homo sapiens
  source 1..21: mol_type = genomic DNA
tgccattaatgagaagtgctg

SEQ ID NO: 1717 - DNA, 22 bp, Homo sapiens
  source 1..22: mol_type = genomic DNA
tggcaatcctgttaaacaactc

SEQ ID NO: 1718 - DNA, 22 bp, Homo sapiens
  source 1..22: mol_type = genomic DNA
cccgaacattgataacagaaga

SEQ ID NO: 1719 - DNA, 22 bp, Homo sapiens
  source 1..22: mol_type = genomic DNA
gcaactcaggaaagactacatc

SEQ ID NO: 1720 - DNA, 22 bp, Homo sapiens
  source 1..22: mol_type = genomic DNA
ttaagaaagtacccatcctccc

SEQ ID NO: 1721 - DNA, 21 bp, Homo sapiens
  source 1..21: mol_type = genomic DNA
gtcatgccttacaacttagca

SEQ ID NO: 1722 - DNA, 21 bp, Homo sapiens
  source 1..21: mol_type = genomic DNA
aatctttgccaaggtatgagc

SEQ ID NO: 1723 - DNA, 21 bp, Homo sapiens
  source 1..21: mol_type = genomic DNA
gccacttatacctccagacat

SEQ ID NO: 1724 - DNA, 20 bp, Homo sapiens
  source 1..20: mol_type = genomic DNA
ccacaatcctgaatgccatg

SEQ ID NO: 1725 - DNA, 21 bp, Homo sapiens
  source 1..21: mol_type = genomic DNA
ctgcaaggtacaacacaagtc

SEQ ID NO: 1726 - DNA, 21 bp, Homo sapiens
  source 1..21: mol_type = genomic DNA
atctctgtgccagcaagtatt

SEQ ID NO: 1727 - DNA, 21 bp, Homo sapiens
  source 1..21: mol_type = genomic DNA
attgggaaactgtcactgatg

SEQ ID NO: 1728 - DNA, 21 bp, Homo sapiens
  source 1..21: mol_type = genomic DNA
gccctaatagagaagcaaagc

SEQ ID NO: 1729 - DNA, 21 bp, Homo sapiens
  source 1..21: mol_type = genomic DNA
gggagccaatcagatagaagt

SEQ ID NO: 1730 - DNA, 22 bp, Homo sapiens
  source 1..22: mol_type = genomic DNA
gggaagttgggctatttaatgc

SEQ ID NO: 1731 - DNA, 21 bp, Homo sapiens
  source 1..21: mol_type = genomic DNA
aactgtgtagagcgaccaaat

SEQ ID NO: 1732 - DNA, 21 bp, Homo sapiens
  source 1..21: mol_type = genomic DNA
cagtaaggccatggtctagat

SEQ ID NO: 1733 - DNA, 21 bp, Homo sapiens
  source 1..21: mol_type = genomic DNA
ctcagaacatttgcaccttct

SEQ ID NO: 1734 - DNA, 21 bp, Homo sapiens
  source 1..21: mol_type = genomic DNA
acctgatacaatggagcatgt

SEQ ID NO: 1735 - DNA, 21 bp, Homo sapiens
  source 1..21: mol_type = genomic DNA
gggacctaaactcctttggaa

SEQ ID NO: 1736 - DNA, 21 bp, Homo sapiens
  source 1..21: mol_type = genomic DNA
tctgcagtggtgttatctagt

SEQ ID NO: 1737 - DNA, 20 bp, Homo sapiens
  source 1..20: mol_type = genomic DNA
cacttaagtttccacgccag

SEQ ID NO: 1738 - DNA, 21 bp, Homo sapiens
  source 1..21: mol_type = genomic DNA
gtaatggcgagaggttaaagc

SEQ ID NO: 1739 - DNA, 22 bp, Homo sapiens
  source 1..22: mol_type = genomic DNA
tttaggtatcgaagttgggtca

SEQ ID NO: 1740 - DNA, 22 bp, Homo sapiens
  source 1..22: mol_type = genomic DNA
gataagtttggaagctgcatca

SEQ ID NO: 1741 - DNA, 21 bp, Homo sapiens
  source 1..21: mol_type = genomic DNA
aagctctgccattgactttac

SEQ ID NO: 1742 - DNA, 20 bp, Homo sapiens
  source 1..20: mol_type = genomic DNA
ccctacagaaccgaggaatc

SEQ ID NO: 1743 - DNA, 21 bp, Homo sapiens
  source 1..21: mol_type = genomic DNA
tcaatctttgcatacacagcc

SEQ ID NO: 1744 - DNA, 22 bp, Homo sapiens
  source 1..22: mol_type = genomic DNA
gtaggtttacatggacagatgc

SEQ ID NO: 1745 - DNA, 21 bp, Homo sapiens
  source 1..21: mol_type = genomic DNA
tcttctgtttagtgctgtggt

SEQ ID NO: 1746 - DNA, 21 bp, Homo sapiens
  source 1..21: mol_type = genomic DNA
caagttcatttcttccctgca

SEQ ID NO: 1747 - DNA, 21 bp, Homo sapiens
  source 1..21: mol_type = genomic DNA
tgcaggaatacatggtagaca

SEQ ID NO: 1748 - DNA, 21 bp, Homo sapiens
  source 1..21: mol_type = genomic DNA
cataggccttcatgtctctca

SEQ ID NO: 1749 - DNA, 21 bp, Homo sapiens
  source 1..21: mol_type = genomic DNA
tatgagggtgcactaacagat

SEQ ID NO: 1750 - DNA, 21 bp, Homo sapiens
  source 1..21: mol_type = genomic DNA
ggtgctactactggtgtatgt

SEQ ID NO: 1751 - DNA, 21 bp, Homo sapiens
  source 1..21: mol_type = genomic DNA
gccatgcaatatcaaatccca

SEQ ID NO: 1752 - DNA, 21 bp, Homo sapiens
  source 1..21: mol_type = genomic DNA
gaaaccaaagactagtgcagc

SEQ ID NO: 1753 - DNA, 21 bp, Homo sapiens
  source 1..21: mol_type = genomic DNA
atgactaacactctgccaagt

SEQ ID NO: 1754 - DNA, 21 bp, Homo sapiens
  source 1..21: mol_type = genomic DNA
aacaaatgcatcccagacaga

SEQ ID NO: 1755 - DNA, 21 bp, Homo sapiens
  source 1..21: mol_type = genomic DNA
gcagagaggagtatgtggtat

SEQ ID NO: 1756 - DNA, 21 bp, Homo sapiens
  source 1..21: mol_type = genomic DNA
atgggtcattctacgaagcaa

SEQ ID NO: 1757 - DNA, 22 bp, Homo sapiens
  source 1..22: mol_type = genomic DNA
tggtgtgtgtggtgataattag

SEQ ID NO: 1758 - DNA, 21 bp, Homo sapiens
  source 1..21: mol_type = genomic DNA
agtgaccctctgaataacctg

SEQ ID NO: 1759 - DNA, 21 bp, Homo sapiens
  source 1..21: mol_type = genomic DNA
tcagcaagtaaacctgagacc

SEQ ID NO: 1760 - DNA, 20 bp, Homo sapiens
  source 1..20: mol_type = genomic DNA
gtaccttcaccctccagatc

SEQ ID NO: 1761 - DNA, 21 bp, Homo sapiens
  source 1..21: mol_type = genomic DNA
tcatcaaattgcccactccta

SEQ ID NO: 1762 - DNA, 21 bp, Homo sapiens
  source 1..21: mol_type = genomic DNA
catcagactgtcttgcctttc

SEQ ID NO: 1763 - DNA, 21 bp, Homo sapiens
  source 1..21: mol_type = genomic DNA
cattcttgctgacatttccca

SEQ ID NO: 1764 - DNA, 22 bp, Homo sapiens
  source 1..22: mol_type = genomic DNA
gaagatcagggtattgctgaaa

SEQ ID NO: 1765 - DNA, 21 bp, Homo sapiens
  source 1..21: mol_type = genomic DNA
tttgtaggtcattcagcctcc

SEQ ID NO: 1766 - DNA, 22 bp, Homo sapiens
  source 1..22: mol_type = genomic DNA
tggctaggattcacttaggaaa

SEQ ID NO: 1767 - DNA, 21 bp, Homo sapiens
  source 1..21: mol_type = genomic DNA
gcaaacagggtgaattatgct

SEQ ID NO: 1768 - DNA, 21 bp, Homo sapiens
  source 1..21: mol_type = genomic DNA
agaagtctgggaaacgaagag

SEQ ID NO: 1769 - DNA, 21 bp, Homo sapiens
  source 1..21: mol_type = genomic DNA
cagatgctccattactaggtg

SEQ ID NO: 1770 - DNA, 21 bp, Homo sapiens
  source 1..21: mol_type = genomic DNA
cacatggagaaaggtgaatca

SEQ ID NO: 1771 - DNA, 20 bp, Homo sapiens
  source 1..20: mol_type = genomic DNA
tcccatccaatactgccttc

SEQ ID NO: 1772 - DNA, 21 bp, Homo sapiens
  source 1..21: mol_type = genomic DNA
tctggctcaaaggatcacatg

SEQ ID NO: 1773 - DNA, 21 bp, Homo sapiens
  source 1..21: mol_type = genomic DNA
aagatcccattgaccctgaat

SEQ ID NO: 1774 - DNA, 21 bp, Homo sapiens
  source 1..21: mol_type = genomic DNA
ccacaggctctctagaactaa

SEQ ID NO: 1775 - DNA, 21 bp, Homo sapiens
  source 1..21: mol_type = genomic DNA
ttgagagggtttacaaggtcc

SEQ ID NO: 1776 - DNA, 22 bp, Homo sapiens
  source 1..22: mol_type = genomic DNA
cttctcctactctgcattctca

SEQ ID NO: 1777 - DNA, 21 bp, Homo sapiens
  source 1..21: mol_type = genomic DNA
gacattagtggattcaggcca

SEQ ID NO: 1778 - DNA, 21 bp, Homo sapiens
  source 1..21: mol_type = genomic DNA
gctgaagtggaggcaattaac

SEQ ID NO: 1779 - DNA, 21 bp, Homo sapiens
  source 1..21: mol_type = genomic DNA
tataactgttgagtctgccca

SEQ ID NO: 1780 - DNA, 21 bp, Homo sapiens
  source 1..21: mol_type = genomic DNA
actgagcttacattcatgcac

SEQ ID NO: 1781 - DNA, 21 bp, Homo sapiens
  source 1..21: mol_type = genomic DNA
gccactttctctgcaaagaat

SEQ ID NO: 1782 - DNA, 21 bp, Homo sapiens
  source 1..21: mol_type = genomic DNA
acttcctacggactcaaatct

SEQ ID NO: 1783 - DNA, 21 bp, Homo sapiens
  source 1..21: mol_type = genomic DNA
ggctctcattacaattggctg

SEQ ID NO: 1784 - DNA, 21 bp, Homo sapiens
  source 1..21: mol_type = genomic DNA
attgctttcagtggtggattg

SEQ ID NO: 1785 - DNA, 21 bp, Homo sapiens
  source 1..21: mol_type = genomic DNA
ggaatgaaacagaggagtccc

SEQ ID NO: 1786 - DNA, 21 bp, Homo sapiens
  source 1..21: mol_type = genomic DNA
aagatgctagaaacccacaag

SEQ ID NO: 1787 - DNA, 20 bp, Homo sapiens
  source 1..20: mol_type = genomic DNA
aatgggtgggttacagagag

SEQ ID NO: 1788 - DNA, 20 bp, Homo sapiens
  source 1..20: mol_type = genomic DNA
gcatttggacatgaacaagc

SEQ ID NO: 1789 - DNA, 20 bp, Homo sapiens
  source 1..20: mol_type = genomic DNA
cattggtgggtggatagctg

SEQ ID NO: 1790 - DNA, 20 bp, Homo sapiens
  source 1..20: mol_type = genomic DNA
accaggaggagaaaagcaaa

SEQ ID NO: 1791 - DNA, 20 bp, Homo sapiens
  source 1..20: mol_type = genomic DNA
cggaaaacaaaccctgaagt

SEQ ID NO: 1792 - DNA, 20 bp, Homo sapiens
  source 1..20: mol_type = genomic DNA
acctgcatattgagccatac

SEQ ID NO: 1793 - DNA, 21 bp, Homo sapiens
  source 1..21: mol_type = genomic DNA
tgttctttcacttttagcccc

SEQ ID NO: 1794 - DNA, 21 bp, Homo sapiens
  source 1..21: mol_type = genomic DNA
tttctagaaccctcagcaact

SEQ ID NO: 1795 - DNA, 21 bp, Homo sapiens
  source 1..21: mol_type = genomic DNA
cccccaacagtttttagtggt

SEQ ID NO: 1796 - DNA, 20 bp, Homo sapiens
  source 1..20: mol_type = genomic DNA
aaggcaaaacactccctttt

SEQ ID NO: 1797 - DNA, 22 bp, Homo sapiens
  source 1..22: mol_type = genomic DNA
cagtgattgcctctagaaaagg

SEQ ID NO: 1798 - DNA, 20 bp, Homo sapiens
  source 1..20: mol_type = genomic DNA
ctaagcagattgaagcagct

SEQ ID NO: 1799 - DNA, 20 bp, Homo sapiens
  source 1..20: mol_type = genomic DNA
tgtccccaggcttaagaatc

SEQ ID NO: 1800 - DNA, 20 bp, Homo sapiens
  source 1..20: mol_type = genomic DNA
agccagaataagcaactgtc

SEQ ID NO: 1801 - DNA, 20 bp, Homo sapiens
  source 1..20: mol_type = genomic DNA
tttctcctatcccagcttgc

SEQ ID NO: 1802 - DNA, 21 bp, Homo sapiens
  source 1..21: mol_type = genomic DNA
agtacagaggataacaagggt

SEQ ID NO: 1803 - DNA, 20 bp, Homo sapiens
  source 1..20: mol_type = genomic DNA
ctcccatcagtaccctctct

SEQ ID NO: 1804 - DNA, 21 bp, Homo sapiens
  source 1..21: mol_type = genomic DNA
ggaatgcctaaaccatactgt

SEQ ID NO: 1805 - DNA, 22 bp, Homo sapiens
  source 1..22: mol_type = genomic DNA
agtggtatttcaatgctctacc

SEQ ID NO: 1806 - DNA, 19 bp, Homo sapiens
  source 1..19: mol_type = genomic DNA
gcagtacatcgtcctggaa

SEQ ID NO: 1807 - DNA, 21 bp, Homo sapiens
  source 1..21: mol_type = genomic DNA
cctgagcgagaagaaatttgt

SEQ ID NO: 1808 - DNA, 21 bp, Homo sapiens
  source 1..21: mol_type = genomic DNA
ggaactgaacaagaagtggag

SEQ ID NO: 1809 - DNA, 20 bp, Homo sapiens
  source 1..20: mol_type = genomic DNA
acctactcttattccgcact

SEQ ID NO: 1810 - DNA, 20 bp, Homo sapiens
  source 1..20: mol_type = genomic DNA
tgacagcctctctcttcaat

SEQ ID NO: 1811 - DNA, 18 bp, Homo sapiens
  source 1..18: mol_type = genomic DNA
aaaaaaaaaaaaaaaaaa

SEQ ID NO: 1812 - DNA, 20 bp, Homo sapiens
  source 1..20: mol_type = genomic DNA
gctgtttttctgtgtgcttc

SEQ ID NO: 1813 - DNA, 20 bp, Homo sapiens
  source 1..20: mol_type = genomic DNA
atgtatttcctttagcgccc

SEQ ID NO: 1814 - DNA, 20 bp, Homo sapiens
  source 1..20: mol_type = genomic DNA
aattttgcaagacttccggt

SEQ ID NO: 1815 - DNA, 20 bp, Homo sapiens
  source 1..20: mol_type = genomic DNA
tcccagttgtgaacatttgc

SEQ ID NO: 1816 - DNA, 21 bp, Homo sapiens
  source 1..21: mol_type = genomic DNA
atgggtttttgcacagatgac

SEQ ID NO: 1817 - DNA, 19 bp, Homo sapiens
  source 1..19: mol_type = genomic DNA
gggagtcagaaggaggtca

SEQ ID NO: 1818 - DNA, 21 bp, Homo sapiens
  source 1..21: mol_type = genomic DNA
cctctttttgcatgaacctga

SEQ ID NO: 1819 - DNA, 20 bp, Homo sapiens
  source 1..20: mol_type = genomic DNA
ccttaccctttccactcaga

SEQ ID NO: 1820 - DNA, 21 bp, Homo sapiens
  source 1..21: mol_type = genomic DNA
gactggtataatcttgccgtg

SEQ ID NO: 1821 - DNA, 21 bp, Homo sapiens
  source 1..21: mol_type = genomic DNA
tgtctgcatcttgatctctgg

SEQ ID NO: 1822 - DNA, 19 bp, Homo sapiens
  source 1..19: mol_type = genomic DNA
ggttccacagcatttgagc

SEQ ID NO: 1823 - DNA, 20 bp, Homo sapiens
  source 1..20: mol_type = genomic DNA
aggagcccttaactatggtg

SEQ ID NO: 1824 - DNA, 20 bp, Homo sapiens
  source 1..20: mol_type = genomic DNA
tggcttgggtattgcagata

SEQ ID NO: 1825 - DNA, 20 bp, Homo sapiens
  source 1..20: mol_type = genomic DNA
ggggacagtagaagatgagt

SEQ ID NO: 1826 - DNA, 20 bp, Homo sapiens
  source 1..20: mol_type = genomic DNA
agttgtttctggacggactt

SEQ ID NO: 1827 - DNA, 21 bp, Homo sapiens
  source 1..21: mol_type = genomic DNA
agaatttccctgtccatacca

SEQ ID NO: 1828 - DNA, 20 bp, Homo sapiens
  source 1..20: mol_type = genomic DNA
agtgagtgaacttgccatca

SEQ ID NO: 1829 - DNA, 20 bp, Homo sapiens
  source 1..20: mol_type = genomic DNA
ggcttttctctgcactgatt

SEQ ID NO: 1830 - DNA, 21 bp, Homo sapiens
  source 1..21: mol_type = genomic DNA
gcaaaggaaacaggctaacta

SEQ ID NO: 1831 - DNA, 21 bp, Homo sapiens
  source 1..21: mol_type = genomic DNA
atggcagctgaatcgatatct

SEQ ID NO: 1832 - DNA, 21 bp, Homo sapiens
  source 1..21: mol_type = genomic DNA
taggtgatgggcaaattctca

SEQ ID NO: 1833 - DNA, 22 bp, Homo sapiens
  source 1..22: mol_type = genomic DNA
gaaatgccttcccacttacaat

SEQ ID NO: 1834 - DNA, 21 bp, Homo sapiens
  source 1..21: mol_type = genomic DNA
attggcaaatgtacctgaagc

SEQ ID NO: 1835 - DNA, 21 bp, Homo sapiens
  source 1..21: mol_type = genomic DNA
caatgattgctcttgtgccaa

SEQ ID NO: 1836 - DNA, 21 bp, Homo sapiens
  source 1..21: mol_type = genomic DNA
agctgtcctcctctccatata

SEQ ID NO: 1837 - DNA, 21 bp, Homo sapiens
  source 1..21: mol_type = genomic DNA
ggcgttcaagttactcgattg

SEQ ID NO: 1838 - DNA, 21 bp, Homo sapiens
  source 1..21: mol_type = genomic DNA
tagtgactagctttggagagt

SEQ ID NO: 1839 - DNA, 22 bp, Homo sapiens
  source 1..22: mol_type = genomic DNA
agccaatgatcccttatgactt

SEQ ID NO: 1840 - DNA, 21 bp, Homo sapiens
  source 1..21: mol_type = genomic DNA
aactaaactggtaggcaatcg

SEQ ID NO: 1841 - DNA, 21 bp, Homo sapiens
  source 1..21: mol_type = genomic DNA
caatcagaccacaggaaggaa

SEQ ID NO: 1842 - DNA, 21 bp, Homo sapiens
  source 1..21: mol_type = genomic DNA
gatgtgtttattgcctgtggt

SEQ ID NO: 1843 - DNA, 21 bp, Homo sapiens
  source 1..21: mol_type = genomic DNA
gctcctttcatagtttcaggg

SEQ ID NO: 1844 - DNA, 22 bp, Homo sapiens
  source 1..22: mol_type = genomic DNA
acacactgcagttctcactata

SEQ ID NO: 1845 - DNA, 21 bp, Homo sapiens
  source 1..21: mol_type = genomic DNA
tgaatcaagtgacatgacagc

SEQ ID NO: 1846 - DNA, 21 bp, Homo sapiens
  source 1..21: mol_type = genomic DNA
ttcttacagtcctcagcactt

SEQ ID NO: 1847 - DNA, 21 bp, Homo sapiens
  source 1..21: mol_type = genomic DNA
ccactaggctgcactaatgta

SEQ ID NO: 1848 - DNA, 22 bp, Homo sapiens
  source 1..22: mol_type = genomic DNA
cactagcttctgtaactgtgtg

SEQ ID NO: 1849 - DNA, 21 bp, Homo sapiens
  source 1..21: mol_type = genomic DNA
gtctcacactgctcatttcca

SEQ ID NO: 1850 - DNA, 21 bp, Homo sapiens
  source 1..21: mol_type = genomic DNA
cactagggttcatcagctgtt

SEQ ID NO: 1851 - DNA, 21 bp, Homo sapiens
  source 1..21: mol_type = genomic DNA
caaccaacattagagtgaccc

SEQ ID NO: 1852 - DNA, 21 bp, Homo sapiens
  source 1..21: mol_type = genomic DNA
gctggttgagagagagagaga

SEQ ID NO: 1853 - DNA, 21 bp, Homo sapiens
  source 1..21: mol_type = genomic DNA
acaccagccgaatacagattt

SEQ ID NO: 1854 - DNA, 21 bp, Homo sapiens
  source 1..21: mol_type = genomic DNA
tgcttcatacctttctgcttc

SEQ ID NO: 1855 - DNA, 21 bp, Homo sapiens
  source 1..21: mol_type = genomic DNA
atttcccatgcctttcaactc

SEQ ID NO: 1856 - DNA, 21 bp, Homo sapiens
  source 1..21: mol_type = genomic DNA
tctctcagtaggcgtctttaa

SEQ ID NO: 1857 - DNA, 20 bp, Homo sapiens
  source 1..20: mol_type = genomic DNA
tgactgctacgctagacttg

SEQ ID NO: 1858 - DNA, 20 bp, Homo sapiens
  source 1..20: mol_type = genomic DNA
ggatagaggaaacccaggtg

SEQ ID NO: 1859 - DNA, 21 bp, Homo sapiens
  source 1..21: mol_type = genomic DNA
ggctctttcaaagtatccagg

SEQ ID NO: 1860 - DNA, 22 bp, Homo sapiens
  source 1..22: mol_type = genomic DNA
agactttctttgttgccttcag

SEQ ID NO: 1861 - DNA, 20 bp, Homo sapiens
  source 1..20: mol_type = genomic DNA
gcctcaacaattcagtccac

SEQ ID NO: 1862 - DNA, 22 bp, Homo sapiens
  source 1..22: mol_type = genomic DNA
cataagttgctggaagagaaca

SEQ ID NO: 1863 - DNA, 21 bp, Homo sapiens
  source 1..21: mol_type = genomic DNA
tcgactgctttaagtgaagga

SEQ ID NO: 1864 - DNA, 22 bp, Homo sapiens
  source 1..22: mol_type = genomic DNA
accagtgattagtgtttctcct

SEQ ID NO: 1865 - DNA, 21 bp, Homo sapiens
  source 1..21: mol_type = genomic DNA
caagacacacacaaacacaca

SEQ ID NO: 1866 - DNA, 21 bp, Homo sapiens
  source 1..21: mol_type = genomic DNA
ggtaagagttgccctaatgtc

SEQ ID NO: 1867 - DNA, 20 bp, Homo sapiens
  source 1..20: mol_type = genomic DNA
gcttggcttctcacaaatgt

SEQ ID NO: 1868 - DNA, 20 bp, Homo sapiens
  source 1..20: mol_type = genomic DNA
gtttgccagtagaaatggga

SEQ ID NO: 1869 - DNA, 20 bp, Homo sapiens
  source 1..20: mol_type = genomic DNA
gtaaagtgttcagaggacgg

SEQ ID NO: 1870 - DNA, 21 bp, Homo sapiens
  source 1..21: mol_type = genomic DNA
actagggagaagaattggcag

SEQ ID NO: 1871 - DNA, 20 bp, Homo sapiens
  source 1..20: mol_type = genomic DNA
ccagttcattccagcttcca

SEQ ID NO: 1872 - DNA, 22 bp, Homo sapiens
  source 1..22: mol_type = genomic DNA
gatcgccaacctgttttataag

SEQ ID NO: 1873 - DNA, 21 bp, Homo sapiens
  source 1..21: mol_type = genomic DNA
gctgtcaaagtggagataacc

SEQ ID NO: 1874 - DNA, 21 bp, Homo sapiens
  source 1..21: mol_type = genomic DNA
aacgcttccatccacctaatt

SEQ ID NO: 1875 - DNA, 21 bp, Homo sapiens
  source 1..21: mol_type = genomic DNA
acctgcctgtcttaccattaa

SEQ ID NO: 1876 - DNA, 23 bp, Homo sapiens
  source 1..23: mol_type = genomic DNA
gatactttcctttctccagatct

SEQ ID NO: 1877 - DNA, 20 bp, Homo sapiens
  source 1..20: mol_type = genomic DNA
ggccgcagtttttgatttag

SEQ ID NO: 1878 - DNA, 19 bp, Homo sapiens
  source 1..19: mol_type = genomic DNA
tgggaaggacggtttgtta

SEQ ID NO: 1879 - DNA, 20 bp, Homo sapiens
  source 1..20: mol_type = genomic DNA
tgaatcatgctgtggagaac

SEQ ID NO: 1880 - DNA, 20 bp, Homo sapiens
  source 1..20: mol_type = genomic DNA
atagaagaggtacccagcaa

SEQ ID NO: 1881 - DNA, 20 bp, Homo sapiens
  source 1..20: mol_type = genomic DNA
ccctgactatgctaagttgc

SEQ ID NO: 1882 - DNA, 20 bp, Homo sapiens
  source 1..20: mol_type = genomic DNA
tgcaagcaaaatgaaaccag

SEQ ID NO: 1883 - DNA, 18 bp, Homo sapiens
  source 1..18: mol_type = genomic DNA
aaaaaaaaaaaaaaaaaa

SEQ ID NO: 1884 - DNA, 19 bp, Homo sapiens
  source 1..19: mol_type = genomic DNA
cagctgctccttctttagc

SEQ ID NO: 1885 - DNA, 20 bp, Homo sapiens
  source 1..20: mol_type = genomic DNA
tatactgccaaaggtgacct

SEQ ID NO: 1886 - DNA, 21 bp, Homo sapiens
  source 1..21: mol_type = genomic DNA
gaagcataatgagaacctcca

SEQ ID NO: 1887 - DNA, 20 bp, Homo sapiens
  source 1..20: mol_type = genomic DNA
aacccaacttgcagacaatc

SEQ ID NO: 1888 - DNA, 20 bp, Homo sapiens
  source 1..20: mol_type = genomic DNA
atctgtttgctgtgtcagaa

SEQ ID NO: 1889 - DNA, 23 bp, Homo sapiens
  source 1..23: mol_type = genomic DNA
tccagatatattcaaaagggaga

SEQ ID NO: 1890 - DNA, 20 bp, Homo sapiens
  source 1..20: mol_type = genomic DNA
aggtttttatcaaagcccca

SEQ ID NO: 1891 - DNA, 21 bp, Homo sapiens
  source 1..21: mol_type = genomic DNA
gggacttgatgttctaagcaa

SEQ ID NO: 1892 - DNA, 20 bp, Homo sapiens
  source 1..20: mol_type = genomic DNA
cctacatgatacgcacagtc

SEQ ID NO: 1893 - DNA, 18 bp, Homo sapiens
  source 1..18: mol_type = genomic DNA
aaaaaaaaaaaaaaaaaa

SEQ ID NO: 1894 - DNA, 20 bp, Homo sapiens
  source 1..20: mol_type = genomic DNA
gtttttctctacccagcaca

SEQ ID NO: 1895 - DNA, 21 bp, Homo sapiens
  source 1..21: mol_type = genomic DNA
ctctaatttgccaccctcttt

SEQ ID NO: 1896 - DNA, 20 bp, Homo sapiens
  source 1..20: mol_type = genomic DNA
gaacgctaaagcttttccca

SEQ ID NO: 1897 - DNA, 20 bp, Homo sapiens
  source 1..20: mol_type = genomic DNA
tctttctcctgccaagtaga

SEQ ID NO: 1898 - DNA, 20 bp, Homo sapiens
  source 1..20: mol_type = genomic DNA
ataacactgtccttctgggc

SEQ ID NO: 1899 - DNA, 20 bp, Homo sapiens
  source 1..20: mol_type = genomic DNA
gagcctactctctgatacga

SEQ ID NO: 1900 - DNA, 21 bp, Homo sapiens
  source 1..21: mol_type = genomic DNA
ccagttgttcacttctctgat

SEQ ID NO: 1901 - DNA, 20 bp, Homo sapiens
  source 1..20: mol_type = genomic DNA
gccttaaaaccaaactgtgt

SEQ ID NO: 1902 - DNA, 20 bp, Homo sapiens
  source 1..20: mol_type = genomic DNA
ctggacttcaatcacccaag

SEQ ID NO: 1903 - DNA, 20 bp, Homo sapiens
  source 1..20: mol_type = genomic DNA
tgaacaaattgctgtgctga

SEQ ID NO: 1904 - DNA, 20 bp, Homo sapiens
  source 1..20: mol_type = genomic DNA
ccccctaaatgaaagtggtc

SEQ ID NO: 1905 - DNA, 18 bp, Homo sapiens
  source 1..18: mol_type = genomic DNA
aaaaaaaaaaaaaaaaaa

SEQ ID NO: 1906 - DNA, 20 bp, Homo sapiens
  source 1..20: mol_type = genomic DNA
tgagtgcttggaattttgca

SEQ ID NO: 1907 - DNA, 20 bp, Homo sapiens
  source 1..20: mol_type = genomic DNA
ggttggctacttcatggtac

SEQ ID NO: 1908 - DNA, 20 bp, Homo sapiens
  source 1..20: mol_type = genomic DNA
tcactgcattcctagaacct

SEQ ID NO: 1909 - DNA, 20 bp, Homo sapiens
  source 1..20: mol_type = genomic DNA
ataactcaggcaaaatgggg

SEQ ID NO: 1910 - DNA, 20 bp, Homo sapiens
  source 1..20: mol_type = genomic DNA
ccttctgctctcactttacg

SEQ ID NO: 1911 - DNA, 20 bp, Homo sapiens
  source 1..20: mol_type = genomic DNA
ggatactagcagaggtggag

SEQ ID NO: 1912 - DNA, 21 bp, Homo sapiens
  source 1..21: mol_type = genomic DNA
tgtacacaatatgccaggaac

SEQ ID NO: 1913 - DNA, 20 bp, Homo sapiens
  source 1..20: mol_type = genomic DNA
gcacttgagttatgggactt

SEQ ID NO: 1914 - DNA, 23 bp, Homo sapiens
  source 1..23: mol_type = genomic DNA
tgtgatatgtagtgtgtatcagt

SEQ ID NO: 1915 - DNA, 20 bp, Homo sapiens
  source 1..20: mol_type = genomic DNA
gaatgtgttcaaaggagggt

SEQ ID NO: 1916 - DNA, 20 bp, Homo sapiens
  source 1..20: mol_type = genomic DNA
gatgaaggggattacgggaa

SEQ ID NO: 1917 - DNA, 20 bp, Homo sapiens
  source 1..20: mol_type = genomic DNA
tttaggaagcagcacaagaa

SEQ ID NO: 1918 - DNA, 18 bp, Homo sapiens
  source 1..18: mol_type = genomic DNA
gagggtgctggggttatc

SEQ ID NO: 1919 - DNA, 20 bp, Homo sapiens
  source 1..20: mol_type = genomic DNA
cccgaaagcacttacctttt

SEQ ID NO: 1920 - DNA, 20 bp, Homo sapiens
  source 1..20: mol_type = genomic DNA
ttcatgagctgcaatgtgtt

SEQ ID NO: 1921 - DNA, 20 bp, Homo sapiens
  source 1..20: mol_type = genomic DNA
tgctatgaaaagagggacca

SEQ ID NO: 1922 - DNA, 20 bp, Homo sapiens
  source 1..20: mol_type = genomic DNA
gtcctggatctacacgtgaa

SEQ ID NO: 1923 - DNA, 20 bp, Homo sapiens
  source 1..20: mol_type = genomic DNA
gtaaatctgtgtgccagcaa

SEQ ID NO: 1924 - DNA, 20 bp, Homo sapiens
  source 1..20: mol_type = genomic DNA
taaaagaggcgtgtggaaaa

SEQ ID NO: 1925 - DNA, 20 bp, Homo sapiens
  source 1..20: mol_type = genomic DNA
ccagtagcttgtgatgtgta

SEQ ID NO: 1926 - DNA, 20 bp, Homo sapiens
  source 1..20: mol_type = genomic DNA
tacaggcctctgaaagatga

SEQ ID NO: 1927 - DNA, 20 bp, Homo sapiens
  source 1..20: mol_type = genomic DNA
agagcatgctagacgtcttt

SEQ ID NO: 1928 - DNA, 20 bp, Homo sapiens
  source 1..20: mol_type = genomic DNA
ctgggctgtaattaaggctc

SEQ ID NO: 1929 - DNA, 20 bp, Homo sapiens
  source 1..20: mol_type = genomic DNA
aacacctgcacactttgaaa

SEQ ID NO: 1930 - DNA, 20 bp, Homo sapiens
  source 1..20: mol_type = genomic DNA
aatgaactttgtgggctgaa

SEQ ID NO: 1931 - DNA, 20 bp, Homo sapiens
  source 1..20: mol_type = genomic DNA
ccacactctcactggttcta

SEQ ID NO: 1932 - DNA, 20 bp, Homo sapiens
  source 1..20: mol_type = genomic DNA
cacagtggatacctcaggaa

SEQ ID NO: 1933 - DNA, 20 bp, Homo sapiens
  source 1..20: mol_type = genomic DNA
ccaacacaggaggaactttt

SEQ ID NO: 1934 - DNA, 22 bp, Homo sapiens
  source 1..22: mol_type = genomic DNA
gagaaaagccaacaaaaatgtg

SEQ ID NO: 1935 - DNA, 22 bp, Homo sapiens
  source 1..22: mol_type = genomic DNA
tgtcattactagaagcaccttt

SEQ ID NO: 1936 - DNA, 23 bp, Homo sapiens
  source 1..23: mol_type = genomic DNA
tggtgtgagttcaggagggttta

SEQ ID NO: 1937 - DNA, 20 bp, Homo sapiens
  source 1..20: mol_type = genomic DNA
accatttctgacagaacaga

SEQ ID NO: 1938 - DNA, 20 bp, Homo sapiens
  source 1..20: mol_type = genomic DNA
tgatgcttaaacacatgcct

SEQ ID NO: 1939 - DNA, 20 bp, Homo sapiens
  source 1..20: mol_type = genomic DNA
aagggatatgcagcttgttc

SEQ ID NO: 1940 - DNA, 18 bp, Homo sapiens
  source 1..18: mol_type = genomic DNA
aaaaaaaaaaaaaaaaaa

SEQ ID NO: 1941 - DNA, 22 bp, Homo sapiens
  source 1..22: mol_type = genomic DNA
gttgtcattcaaatgtcaccac

SEQ ID NO: 1942 - DNA, 19 bp, Homo sapiens
  source 1..19: mol_type = genomic DNA
ctcagattccagagccctc

SEQ ID NO: 1943 - DNA, 20 bp, Homo sapiens
  source 1..20: mol_type = genomic DNA
acattgctagcagcttttgt

SEQ ID NO: 1944 - DNA, 21 bp, Homo sapiens
  source 1..21: mol_type = genomic DNA
acttgccaagaacagtatctg

SEQ ID NO: 1945 - DNA, 20 bp, Homo sapiens
  source 1..20: mol_type = genomic DNA
ttccttcttccaggtgaaca

SEQ ID NO: 1946 - DNA, 20 bp, Homo sapiens
  source 1..20: mol_type = genomic DNA
tgtttctccttcatctggtc

SEQ ID NO: 1947 - DNA, 20 bp, Homo sapiens
  source 1..20: mol_type = genomic DNA
tgtcaccttgcagatacagg

SEQ ID NO: 1948 - DNA, 20 bp, Homo sapiens
  source 1..20: mol_type = genomic DNA
attgttcacagggtcaagtc

SEQ ID NO: 1949 - DNA, 20 bp, Homo sapiens
  source 1..20: mol_type = genomic DNA
atgagccaggagaatcatca

SEQ ID NO: 1950 - DNA, 20 bp, Homo sapiens
  source 1..20: mol_type = genomic DNA
catcatttcaaaggggctca

SEQ ID NO: 1951 - DNA, 20 bp, Homo sapiens
  source 1..20: mol_type = genomic DNA
tcttctctaacacccactcc

SEQ ID NO: 1952 - DNA, 20 bp, Homo sapiens
  source 1..20: mol_type = genomic DNA
acccttaccaaagtagcatc

SEQ ID NO: 1953 - DNA, 20 bp, Homo sapiens
  source 1..20: mol_type = genomic DNA
atcacgacgccttgtttatt

SEQ ID NO: 1954 - DNA, 20 bp, Homo sapiens
  source 1..20: mol_type = genomic DNA
actttcctgccaacaatctc

SEQ ID NO: 1955 - DNA, 20 bp, Homo sapiens
  source 1..20: mol_type = genomic DNA
ttgatagttgcatctgggga

SEQ ID NO: 1956 - DNA, 22 bp, Homo sapiens
  source 1..22: mol_type = genomic DNA
tttgttaactaacgtgattcca

SEQ ID NO: 1957 - DNA, 20 bp, Homo sapiens
  source 1..20: mol_type = genomic DNA
cccactctccatgtgttctt

SEQ ID NO: 1958 - DNA, 20 bp, Homo sapiens
  source 1..20: mol_type = genomic DNA
tcctgcttcaactcaatacg

SEQ ID NO: 1959 - DNA, 20 bp, Homo sapiens
  source 1..20: mol_type = genomic DNA
acccctcattttcgtatgtc

SEQ ID NO: 1960 - DNA, 20 bp, Homo sapiens
  source 1..20: mol_type = genomic DNA
acagttatggaggaattgcg

SEQ ID NO: 1961 - DNA, 22 bp, Homo sapiens
  source 1..22: mol_type = genomic DNA
tcaaacctcttttatctgtccc

SEQ ID NO: 1962 - DNA, 20 bp, Homo sapiens
  source 1..20: mol_type = genomic DNA
atttcacgtaacactctggt

SEQ ID NO: 1963 - DNA, 21 bp, Homo sapiens
  source 1..21: mol_type = genomic DNA
ctctggcaaaactttctggat

SEQ ID NO: 1964 - DNA, 19 bp, Homo sapiens
  source 1..19: mol_type = genomic DNA
gcttctcatgctcacactg

SEQ ID NO: 1965 - DNA, 21 bp, Homo sapiens
  source 1..21: mol_type = genomic DNA
aatatgacttgcccttttgaa

SEQ ID NO: 1966 - DNA, 19 bp, Homo sapiens
  source 1..19: mol_type = genomic DNA
tcacagccagttacacaga

SEQ ID NO: 1967 - DNA, 20 bp, Homo sapiens
  source 1..20: mol_type = genomic DNA
ctacagtgcagaagagtccc

SEQ ID NO: 1968 - DNA, 20 bp, Homo sapiens
  source 1..20: mol_type = genomic DNA
ttggtttcatgtggctttga

SEQ ID NO: 1969 - DNA, 20 bp, Homo sapiens
  source 1..20: mol_type = genomic DNA
tccttctccccaactttctt

SEQ ID NO: 1970 - DNA, 21 bp, Homo sapiens
  source 1..21: mol_type = genomic DNA
ctttagattccagggctcttg

SEQ ID NO: 1971 - DNA, 20 bp, Homo sapiens
  source 1..20: mol_type = genomic DNA
tgaaagcgtgaaaatcagct

SEQ ID NO: 1972 - DNA, 20 bp, Homo sapiens
  source 1..20: mol_type = genomic DNA
actcgatccctaggtaatgt

SEQ ID NO: 1973 - DNA, 20 bp, Homo sapiens
  source 1..20: mol_type = genomic DNA
acaagtgggtagggatgttc

SEQ ID NO: 1974 - DNA, 20 bp, Homo sapiens
  source 1..20: mol_type = genomic DNA
gcacaagttttcagggaatg

SEQ ID NO: 1975 - DNA, 20 bp, Homo sapiens
  source 1..20: mol_type = genomic DNA
gtggaaagtctcgtcagaat

SEQ ID NO: 1976 - DNA, 20 bp, Homo sapiens
  source 1..20: mol_type = genomic DNA
tccacctctgagcataacat

SEQ ID NO: 1977 - DNA, 18 bp, Homo sapiens
  source 1..18: mol_type = genomic DNA
aaaaaaaaaaaaaaaaaa

SEQ ID NO: 1978 - DNA, 18 bp, Homo sapiens
  source 1..18: mol_type = genomic DNA
aaaaaaaaaaaaaaaaaa

SEQ ID NO: 1979 - DNA, 20 bp, Homo sapiens
  source 1..20: mol_type = genomic DNA
ccatcccacttctccagata

SEQ ID NO: 1980 - DNA, 20 bp, Homo sapiens
  source 1..20: mol_type = genomic DNA
ccaccttcctgcttaaagaa

SEQ ID NO: 1981 - DNA, 20 bp, Homo sapiens
  source 1..20: mol_type = genomic DNA
ctccttacttgcactgagtt

SEQ ID NO: 1982 - DNA, 20 bp, Homo sapiens
  source 1..20: mol_type = genomic DNA
gggaaaacttacgggaactt

SEQ ID NO: 1983 - DNA, 22 bp, Homo sapiens
  source 1..22: mol_type = genomic DNA
tagaaatgtttagggtgcatga

SEQ ID NO: 1984 - DNA, 20 bp, Homo sapiens
  source 1..20: mol_type = genomic DNA
tacccctcttttccatctgc

SEQ ID NO: 1985 - DNA, 20 bp, Homo sapiens
  source 1..20: mol_type = genomic DNA
gcattttgacaggaaagtgg

SEQ ID NO: 1986 - DNA, 20 bp, Homo sapiens
  source 1..20: mol_type = genomic DNA
tagggccacagtttctcaat

SEQ ID NO: 1987 - DNA, 20 bp, Homo sapiens
  source 1..20: mol_type = genomic DNA
gaatgagaaatctggcagga

SEQ ID NO: 1988 - DNA, 20 bp, Homo sapiens
  source 1..20: mol_type = genomic DNA
tcagatgcctgatgaccata

SEQ ID NO: 1989 - DNA, 20 bp, Homo sapiens
  source 1..20: mol_type = genomic DNA
aatatgcagtgggtaggagc

SEQ ID NO: 1990 - DNA, 20 bp, Homo sapiens
  source 1..20: mol_type = genomic DNA
gacaacagctgacttccatt

SEQ ID NO: 1991 - DNA, 20 bp, Homo sapiens
  source 1..20: mol_type = genomic DNA
cactctctggaacaaacaca

SEQ ID NO: 1992 - DNA, 20 bp, Homo sapiens
  source 1..20: mol_type = genomic DNA
gttttgaggcggtttcatga

SEQ ID NO: 1993 - DNA, 18 bp, Homo sapiens
  source 1..18: mol_type = genomic DNA
aaaaaaaaaaaaaaaaaa

SEQ ID NO: 1994 - DNA, 20 bp, Homo sapiens
  source 1..20: mol_type = genomic DNA
gaacacctcaaagttgctca

SEQ ID NO: 1995 - DNA, 20 bp, Homo sapiens
  source 1..20: mol_type = genomic DNA
aagaagcaaggacaaggatg

SEQ ID NO: 1996 - DNA, 20 bp, Homo sapiens
  source 1..20: mol_type = genomic DNA
gaaacaaccaccacaacaaa

SEQ ID NO: 1997 - DNA, 20 bp, Homo sapiens
  source 1..20: mol_type = genomic DNA
ccaccatgtttacaccgttt

SEQ ID NO: 1998 - DNA, 20 bp, Homo sapiens
  source 1..20: mol_type = genomic DNA
tttacccatgaattgctgca

SEQ ID NO: 1999 - DNA, 20 bp, Homo sapiens
  source 1..20: mol_type = genomic DNA
agtttgcatttgttcaggga

SEQ ID NO: 2000 - DNA, 20 bp, Homo sapiens
  source 1..20: mol_type = genomic DNA
ttcggatggctttgattgtc

SEQ ID NO: 2001 - DNA, 21 bp, Homo sapiens
  source 1..21: mol_type = genomic DNA
cattgtaaattaaacggcctc

SEQ ID NO: 2002 - DNA, 20 bp, Homo sapiens
  source 1..20: mol_type = genomic DNA
ctaatgcaagctgcttctct

SEQ ID NO: 2003 - DNA, 20 bp, Homo sapiens
  source 1..20: mol_type = genomic DNA
tgtctagtggtaatctgggg

SEQ ID NO: 2004 - DNA, 20 bp, Homo sapiens
  source 1..20: mol_type = genomic DNA
tctggacagtggagttgaaa

SEQ ID NO: 2005 - DNA, 18 bp, Homo sapiens
  source 1..18: mol_type = genomic DNA
aaaaaaaaaaaaaaaaaa

SEQ ID NO: 2006 - DNA, 20 bp, Homo sapiens
  source 1..20: mol_type = genomic DNA
aggagagacataactggtct

SEQ ID NO: 2007 - DNA, 20 bp, Homo sapiens
  source 1..20: mol_type = genomic DNA
attgcaatgtctgtggatgt

SEQ ID NO: 2008 - DNA, 19 bp, Homo sapiens
  source 1..19: mol_type = genomic DNA
aagaagttgaggtagcacg

SEQ ID NO: 2009 - DNA, 20 bp, Homo sapiens
  source 1..20: mol_type = genomic DNA
agtgtcctttcctccagttc

SEQ ID NO: 2010 - DNA, 21 bp, Homo sapiens
  source 1..21: mol_type = genomic DNA
ttgaacctgaaaggaactgtg

SEQ ID NO: 2011 - DNA, 20 bp, Homo sapiens
  source 1..20: mol_type = genomic DNA
gctcaatcacctgttccctt

SEQ ID NO: 2012 - DNA, 21 bp, Homo sapiens
  source 1..21: mol_type = genomic DNA
cattgaagctcactctaaggg

SEQ ID NO: 2013 - DNA, 20 bp, Homo sapiens
  source 1..20: mol_type = genomic DNA
ctaaagtttgggttaggggt

SEQ ID NO: 2014 - DNA, 20 bp, Homo sapiens
  source 1..20: mol_type = genomic DNA
tgccttacattttctgtggg

SEQ ID NO: 2015 - DNA, 20 bp, Homo sapiens
  source 1..20: mol_type = genomic DNA
gccataagatttccccactc

SEQ ID NO: 2016 - DNA, 21 bp, Homo sapiens
  source 1..21: mol_type = genomic DNA
acaaagcaagaggatgaaaca

SEQ ID NO: 2017 - DNA, 20 bp, Homo sapiens
  source 1..20: mol_type = genomic DNA
caaagcaccatcaacactta

SEQ ID NO: 2018 - DNA, 20 bp, Homo sapiens
  source 1..20: mol_type = genomic DNA
cactgcaactcctagaatga

SEQ ID NO: 2019 - DNA, 20 bp, Homo sapiens
  source 1..20: mol_type = genomic DNA
tgtggggaaattgctgttta

SEQ ID NO: 2020 - DNA, 20 bp, Homo sapiens
  source 1..20: mol_type = genomic DNA
gtatgggcagctgtaacttg

SEQ ID NO: 2021 - DNA, 20 bp, Homo sapiens
  source 1..20: mol_type = genomic DNA
tcacaagccactgaaaatgt

SEQ ID NO: 2022 - DNA, 21 bp, Homo sapiens
  source 1..21: mol_type = genomic DNA
tgtatgttaagctagccaaca

SEQ ID NO: 2023 - DNA, 20 bp, Homo sapiens
  source 1..20: mol_type = genomic DNA
tgtgttattgaactttgcca

SEQ ID NO: 2024 - DNA, 20 bp, Homo sapiens
  source 1..20: mol_type = genomic DNA
ttcatccctacctcatcacc

SEQ ID NO: 2025 - DNA, 21 bp, Homo sapiens
  source 1..21: mol_type = genomic DNA
agatcacttttggctgtaacc

SEQ ID NO: 2026 - DNA, 20 bp, Homo sapiens
  source 1..20: mol_type = genomic DNA
caagtgacaatctcagccaa

SEQ ID NO: 2027 - DNA, 20 bp, Homo sapiens
  source 1..20: mol_type = genomic DNA
gcattttcagatggttccct

SEQ ID NO: 2028 - DNA, 20 bp, Homo sapiens
  source 1..20: mol_type = genomic DNA
atggagagtttgagtggagt

SEQ ID NO: 2029 - DNA, 22 bp, Homo sapiens
  source 1..22: mol_type = genomic DNA
ctgccactgggtttatagaaaa

SEQ ID NO: 2030 - DNA, 20 bp, Homo sapiens
  source 1..20: mol_type = genomic DNA
acacctttactcctgtggat

SEQ ID NO: 2031 - DNA, 20 bp, Homo sapiens
  source 1..20: mol_type = genomic DNA
gatgtagggccttatccaca

SEQ ID NO: 2032 - DNA, 20 bp, Homo sapiens
  source 1..20: mol_type = genomic DNA
agcttggtgatcttcaaaca

SEQ ID NO: 2033 - DNA, 20 bp, Homo sapiens
  source 1..20: mol_type = genomic DNA
tgaaatggtgggtaatgctc

SEQ ID NO: 2034 - DNA, 20 bp, Homo sapiens
  source 1..20: mol_type = genomic DNA
catgcaagttcacgaggtta

SEQ ID NO: 2035 - DNA, 20 bp, Homo sapiens
  source 1..20: mol_type = genomic DNA
agtctgaggaagaagcaact

SEQ ID NO: 2036 - DNA, 20 bp, Homo sapiens
  source 1..20: mol_type = genomic DNA
gagtccaatcttttcccaca

SEQ ID NO: 2037 - DNA, 20 bp, Homo sapiens
  source 1..20: mol_type = genomic DNA
tccactgcgttcttatcctt

SEQ ID NO: 2038 - DNA, 20 bp, Homo sapiens
  source 1..20: mol_type = genomic DNA
ggacagaacagctacaaagg

SEQ ID NO: 2039 - DNA, 20 bp, Homo sapiens
  source 1..20: mol_type = genomic DNA
ctggcttgtgaattagaggg

SEQ ID NO: 2040 - DNA, 19 bp, Homo sapiens
  source 1..19: mol_type = genomic DNA
gtaagatggtgggcaggat

SEQ ID NO: 2041 - DNA, 20 bp, Homo sapiens
  source 1..20: mol_type = genomic DNA
agaagggctcaaaacacatc

SEQ ID NO: 2042 - DNA, 21 bp, Homo sapiens
  source 1..21: mol_type = genomic DNA
tcatgtaggctttctgatttt

SEQ ID NO: 2043 - DNA, 20 bp, Homo sapiens
  source 1..20: mol_type = genomic DNA
tgtagctcttgacctagcaa

SEQ ID NO: 2044 - DNA, 21 bp, Homo sapiens
  source 1..21: mol_type = genomic DNA
taagttcacggtgaagtcaac

SEQ ID NO: 2045 - DNA, 20 bp, Homo sapiens
  source 1..20: mol_type = genomic DNA
gtggcttcaactaactggac

SEQ ID NO: 2046 - DNA, 20 bp, Homo sapiens
  source 1..20: mol_type = genomic DNA
acccgtaagtgtttgagtga

SEQ ID NO: 2047 - DNA, 20 bp, Homo sapiens
  source 1..20: mol_type = genomic DNA
tgtagaagtagggtttgcgt

SEQ ID NO: 2048 - DNA, 20 bp, Homo sapiens
  source 1..20: mol_type = genomic DNA
caggggacatttgaagatgg

SEQ ID NO: 2049 - DNA, 20 bp, Homo sapiens
  source 1..20: mol_type = genomic DNA
gaaattgtgcagtgaaagca

SEQ ID NO: 2050 - DNA, 21 bp, Homo sapiens
  source 1..21: mol_type = genomic DNA
atgtaagaagtgcgttgctta

SEQ ID NO: 2051 - DNA, 21 bp, Homo sapiens
  source 1..21: mol_type = genomic DNA
agatctggaatctgagactcc

SEQ ID NO: 2052 - DNA, 22 bp, Homo sapiens
  source 1..22: mol_type = genomic DNA
tataggataaggtcaagcaggt

SEQ ID NO: 2053 - DNA, 18 bp, Homo sapiens
  source 1..18: mol_type = genomic DNA
aaaaaaaaaaaaaaaaaa

SEQ ID NO: 2054 - DNA, 21 bp, Homo sapiens
  source 1..21: mol_type = genomic DNA
tcagtgaatgaggaatcatgc

SEQ ID NO: 2055 - DNA, 20 bp, Homo sapiens
  source 1..20: mol_type = genomic DNA
ttctcaggagtaccacaagc

SEQ ID NO: 2056 - DNA, 20 bp, Homo sapiens
  source 1..20: mol_type = genomic DNA
ggatgaaacacagaaccatg

SEQ ID NO: 2057 - DNA, 20 bp, Homo sapiens
  source 1..20: mol_type = genomic DNA
cagatccctttcattttgca

SEQ ID NO: 2058 - DNA, 20 bp, Homo sapiens
  source 1..20: mol_type = genomic DNA
ggaaaagtgctcaattaggc

SEQ ID NO: 2059 - DNA, 20 bp, Homo sapiens
  source 1..20: mol_type = genomic DNA
ctggcagttatagtcaccaa

SEQ ID NO: 2060 - DNA, 20 bp, Homo sapiens
  source 1..20: mol_type = genomic DNA
aggaagtccttatgatgcca

SEQ ID NO: 2061 - DNA, 20 bp, Homo sapiens
  source 1..20: mol_type = genomic DNA
gctggtgaagttggagtttt

SEQ ID NO: 2062 - DNA, 20 bp, Homo sapiens
  source 1..20: mol_type = genomic DNA
gctgggtttaagccacatat

SEQ ID NO: 2063 - DNA, 20 bp, Homo sapiens
  source 1..20: mol_type = genomic DNA
tgtagcctaaatagcagcct

SEQ ID NO: 2064 - DNA, 23 bp, Homo sapiens
  source 1..23: mol_type = genomic DNA
aggaattgcttttattttaacca

SEQ ID NO: 2065 - DNA, 20 bp, Homo sapiens
  source 1..20: mol_type = genomic DNA
gctgctttcaggtttttgtg

SEQ ID NO: 2066 - DNA, 20 bp, Homo sapiens
  source 1..20: mol_type = genomic DNA
atggtgcagaaaagagcaat

SEQ ID NO: 2067 - DNA, 20 bp, Homo sapiens
  source 1..20: mol_type = genomic DNA
gtgtggtgccattttctttc

SEQ ID NO: 2068 - DNA, 20 bp, Homo sapiens
  source 1..20: mol_type = genomic DNA
gaacaatactttctccccgg

SEQ ID NO: 2069 - DNA, 20 bp, Homo sapiens
  source 1..20: mol_type = genomic DNA
gaaatggccatgctaggaat

SEQ ID NO: 2070 - DNA, 20 bp, Homo sapiens
  source 1..20: mol_type = genomic DNA
acttccagtaacatggatgc

SEQ ID NO: 2071 - DNA, 20 bp, Homo sapiens
  source 1..20: mol_type = genomic DNA
gaaacacccagacttgtagc

SEQ ID NO: 2072 - DNA, 20 bp, Homo sapiens
  source 1..20: mol_type = genomic DNA
ttaaatctttgtgtgcgtgt

SEQ ID NO: 2073 - DNA, 20 bp, Homo sapiens
  source 1..20: mol_type = genomic DNA
cctccaggaactttgttcag

SEQ ID NO: 2074 - DNA, 20 bp, Homo sapiens
  source 1..20: mol_type = genomic DNA
aaaaaccttcacaaacccca

SEQ ID NO: 2075 - DNA, 20 bp, Homo sapiens
  source 1..20: mol_type = genomic DNA
gagtggatattgtctcgctg

SEQ ID NO: 2076 - DNA, 20 bp, Homo sapiens
  source 1..20: mol_type = genomic DNA
actagcccactaatgttgct

SEQ ID NO: 2077 - DNA, 22 bp, Homo sapiens
  source 1..22: mol_type = genomic DNA
cgattatcagaacagatgaggt

SEQ ID NO: 2078 - DNA, 20 bp, Homo sapiens
  source 1..20: mol_type = genomic DNA
attgcacagctgaaaatcct

SEQ ID NO: 2079 - DNA, 20 bp, Homo sapiens
  source 1..20: mol_type = genomic DNA
ggcacactgaccgtatttat

SEQ ID NO: 2080 - DNA, 20 bp, Homo sapiens
  source 1..20: mol_type = genomic DNA
tggtagtgggtcaggaattt

SEQ ID NO: 2081 - DNA, 20 bp, Homo sapiens
  source 1..20: mol_type = genomic DNA
tctcttgaaaagaaaggcgg

SEQ ID NO: 2082 - DNA, 20 bp, Homo sapiens
  source 1..20: mol_type = genomic DNA
tgaattacacagcaaagccc

SEQ ID NO: 2083 - DNA, 20 bp, Homo sapiens
  source 1..20: mol_type = genomic DNA
ctgccaatgggatcgaattt

SEQ ID NO: 2084 - DNA, 20 bp, Homo sapiens
  source 1..20: mol_type = genomic DNA
gagtgacgctgttcattctt

SEQ ID NO: 2085 - DNA, 20 bp, Homo sapiens
  source 1..20: mol_type = genomic DNA
gatagtaaccgggtgtagca

SEQ ID NO: 2086 - DNA, 18 bp, Homo sapiens
  source 1..18: mol_type = genomic DNA
aaaaaaaaaaaaaaaaaa

SEQ ID NO: 2087 - DNA, 23 bp, Homo sapiens
  source 1..23: mol_type = genomic DNA
tctaataagggattgatggagtt

SEQ ID NO: 2088 - DNA, 20 bp, Homo sapiens
  source 1..20: mol_type = genomic DNA
gggagatttcctgcttgtag

SEQ ID NO: 2089 - DNA, 20 bp, Homo sapiens
  source 1..20: mol_type = genomic DNA
aatccatgcagcttctctct

SEQ ID NO: 2090 - DNA, 20 bp, Homo sapiens
  source 1..20: mol_type = genomic DNA
tgcattgtctctggtttgaa

SEQ ID NO: 2091 - DNA, 20 bp, Homo sapiens
  source 1..20: mol_type = genomic DNA
tcctgaatgcatccttaacc

SEQ ID NO: 2092 - DNA, 20 bp, Homo sapiens
  source 1..20: mol_type = genomic DNA
tgggaaaggtgagaaggatt

SEQ ID NO: 2093 - DNA, 20 bp, Homo sapiens
  source 1..20: mol_type = genomic DNA
ttcgggacccatacctaaaa

SEQ ID NO: 2094 - DNA, 20 bp, Homo sapiens
  source 1..20: mol_type = genomic DNA
tcttttctggacccacatga

SEQ ID NO: 2095 - DNA, 22 bp, Homo sapiens
  source 1..22: mol_type = genomic DNA
gacctctacatctgtatcttcc

SEQ ID NO: 2096 - DNA, 20 bp, Homo sapiens
  source 1..20: mol_type = genomic DNA
cccttcattttctgtcccat

SEQ ID NO: 2097 - DNA, 21 bp, Homo sapiens
  source 1..21: mol_type = genomic DNA
tcagccttgagtattagccta

SEQ ID NO: 2098 - DNA, 20 bp, Homo sapiens
  source 1..20: mol_type = genomic DNA
aagtttgccatgaaggtcat

SEQ ID NO: 2099 - DNA, 20 bp, Homo sapiens
  source 1..20: mol_type = genomic DNA
gacttctggttgtttcctca

SEQ ID NO: 2100 - DNA, 20 bp, Homo sapiens
  source 1..20: mol_type = genomic DNA
atgtgtctattgccctacct

SEQ ID NO: 2101 - DNA, 19 bp, Homo sapiens
  source 1..19: mol_type = genomic DNA
tgcgggaagttcacatgaa

SEQ ID NO: 2102 - DNA, 19 bp, Homo sapiens
  source 1..19: mol_type = genomic DNA
gtgaacttcaggctgctta

SEQ ID NO: 2103 - DNA, 20 bp, Homo sapiens
  source 1..20: mol_type = genomic DNA
tggtttcgtcccgtaaatag

SEQ ID NO: 2104 - DNA, 20 bp, Homo sapiens
  source 1..20: mol_type = genomic DNA
aattcctttcaatgctggct

SEQ ID NO: 2105 - DNA, 21 bp, Homo sapiens
  source 1..21: mol_type = genomic DNA
agaaagacacatatgccatgg

SEQ ID NO: 2106 - DNA, 20 bp, Homo sapiens
  source 1..20: mol_type = genomic DNA
ttgttggtgtcagttctgaa

SEQ ID NO: 2107 - DNA, 20 bp, Homo sapiens
  source 1..20: mol_type = genomic DNA
tgtaggaacagattagggca

SEQ ID NO: 2108 - DNA, 20 bp, Homo sapiens
  source 1..20: mol_type = genomic DNA
ctccaagctgatatgccatc

SEQ ID NO: 2109 - DNA, 20 bp, Homo sapiens
  source 1..20: mol_type = genomic DNA
ccacccctcatttcttcctt

SEQ ID NO: 2110 - DNA, 20 bp, Homo sapiens
  source 1..20: mol_type = genomic DNA
gggtccttcgttttctgttt

SEQ ID NO: 2111 - DNA, 21 bp, Homo sapiens
  source 1..21: mol_type = genomic DNA
taggaaacaggctaaaaggga

SEQ ID NO: 2112 - DNA, 20 bp, Homo sapiens
  source 1..20: mol_type = genomic DNA
tactgtgtagaaggcagtgt

SEQ ID NO: 2113 - DNA, 20 bp, Homo sapiens
  source 1..20: mol_type = genomic DNA
gctaaggacaaagaaccact

SEQ ID NO: 2114 - DNA, 18 bp, Homo sapiens
  source 1..18: mol_type = genomic DNA
aaaaaaaaaaaaaaaaaa

SEQ ID NO: 2115 - DNA, 20 bp, Homo sapiens
  source 1..20: mol_type = genomic DNA
tggctaagaccaggattgtt

SEQ ID NO: 2116 - DNA, 18 bp, Homo sapiens
  source 1..18: mol_type = genomic DNA
aaaaaaaaaaaaaaaaaa

SEQ ID NO: 2117 - DNA, 20 bp, Homo sapiens
  source 1..20: mol_type = genomic DNA
tgataggcagatcattcccc

SEQ ID NO: 2118 - DNA, 20 bp, Homo sapiens
  source 1..20: mol_type = genomic DNA
gcaaatggcaaagggaaaac

SEQ ID NO: 2119 - DNA, 19 bp, Homo sapiens
  source 1..19: mol_type = genomic DNA
cacggctagtgctcatttt

SEQ ID NO: 2120 - DNA, 21 bp, Homo sapiens
  source 1..21: mol_type = genomic DNA
ccgtaatacccaagtcatctg

SEQ ID NO: 2121 - DNA, 22 bp, Homo sapiens
  source 1..22: mol_type = genomic DNA
agcaaactaaaacagcaacttc

SEQ ID NO: 2122 - DNA, 19 bp, Homo sapiens
  source 1..19: mol_type = genomic DNA
agcctgctatcttcactgg

SEQ ID NO: 2123 - DNA, 23 bp, Homo sapiens
  source 1..23: mol_type = genomic DNA
accacatatatagagactttgaa

SEQ ID NO: 2124 - DNA, 19 bp, Homo sapiens
  source 1..19: mol_type = genomic DNA
ctccagactctgcaaggat

SEQ ID NO: 2125 - DNA, 20 bp, Homo sapiens
  source 1..20: mol_type = genomic DNA
tttcctgttgctcttgatca

SEQ ID NO: 2126 - DNA, 20 bp, Homo sapiens
  source 1..20: mol_type = genomic DNA
ccacaaagatgaaggccaag

SEQ ID NO: 2127 - DNA, 21 bp, Homo sapiens
  source 1..21: mol_type = genomic DNA
ccataccttagttctcagggt

SEQ ID NO: 2128 - DNA, 20 bp, Homo sapiens
  source 1..20: mol_type = genomic DNA
gtaagagagagctgggacaa

SEQ ID NO: 2129 - DNA, 20 bp, Homo sapiens
  source 1..20: mol_type = genomic DNA
tgtgaccatcctatccacaa

SEQ ID NO: 2130 - DNA, 20 bp, Homo sapiens
  source 1..20: mol_type = genomic DNA
agaaccagttgtacgagttc

SEQ ID NO: 2131 - DNA, 20 bp, Homo sapiens
  source 1..20: mol_type = genomic DNA
agtcttctcccttccttgtc

SEQ ID NO: 2132 - DNA, 20 bp, Homo sapiens
  source 1..20: mol_type = genomic DNA
gcccttttctctctttgacc

SEQ ID NO: 2133 - DNA, 21 bp, Homo sapiens
  source 1..21: mol_type = genomic DNA
tcttgttccaagtattcctgg

SEQ ID NO: 2134 - DNA, 20 bp, Homo sapiens
  source 1..20: mol_type = genomic DNA
accactttagcccatctctt

SEQ ID NO: 2135 - DNA, 20 bp, Homo sapiens
  source 1..20: mol_type = genomic DNA
gtggtggattattgagctgg

SEQ ID NO: 2136 - DNA, 21 bp, Homo sapiens
  source 1..21: mol_type = genomic DNA
tgcttaatgggatcattgacc

SEQ ID NO: 2137 - DNA, 20 bp, Homo sapiens
  source 1..20: mol_type = genomic DNA
cccacatagtgcaaaagaca

SEQ ID NO: 2138 - DNA, 20 bp, Homo sapiens
  source 1..20: mol_type = genomic DNA
gtatgtgtgaagtagccgag

SEQ ID NO: 2139 - DNA, 20 bp, Homo sapiens
  source 1..20: mol_type = genomic DNA
tggtcctaactcagaccttt

SEQ ID NO: 2140 - DNA, 20 bp, Homo sapiens
  source 1..20: mol_type = genomic DNA
aacatgaagggaaggttgtg

SEQ ID NO: 2141 - DNA, 21 bp, Homo sapiens
  source 1..21: mol_type = genomic DNA
tatacttcaacttgcaggcag

SEQ ID NO: 2142 - DNA, 21 bp, Homo sapiens
  source 1..21: mol_type = genomic DNA
gccaaagacaatgagagagtc

SEQ ID NO: 2143 - DNA, 21 bp, Homo sapiens
  source 1..21: mol_type = genomic DNA
atttagcagccatgaccagta

SEQ ID NO: 2144 - DNA, 21 bp, Homo sapiens
  source 1..21: mol_type = genomic DNA
tgggccaattcctaatccatt

SEQ ID NO: 2145 - DNA, 23 bp, Homo sapiens
  source 1..23: mol_type = genomic DNA
cgatctcatgaataagtctgacc

SEQ ID NO: 2146 - DNA, 21 bp, Homo sapiens
  source 1..21: mol_type = genomic DNA
tggaaagcagactaacagtga

SEQ ID NO: 2147 - DNA, 21 bp, Homo sapiens
  source 1..21: mol_type = genomic DNA
gggaccctatgtagagattgt

SEQ ID NO: 2148 - DNA, 21 bp, Homo sapiens
  source 1..21: mol_type = genomic DNA
ggagcccaaggatgtattaga

SEQ ID NO: 2149 - DNA, 21 bp, Homo sapiens
  source 1..21: mol_type = genomic DNA
ctaatagctggttctgcacac

SEQ ID NO: 2150 - DNA, 22 bp, Homo sapiens
  source 1..22: mol_type = genomic DNA
gatgaaatgaatgctgactctc

SEQ ID NO: 2151 - DNA, 21 bp, Homo sapiens
  source 1..21: mol_type = genomic DNA
aaactgaagcttcgagaaccc

SEQ ID NO: 2152 - DNA, 21 bp, Homo sapiens
  source 1..21: mol_type = genomic DNA
tgccgacaactactttaggta

SEQ ID NO: 2153 - DNA, 21 bp, Homo sapiens
  source 1..21: mol_type = genomic DNA
tgtatccaatcacctgtcaga

SEQ ID NO: 2154 - DNA, 21 bp, Homo sapiens
  source 1..21: mol_type = genomic DNA
cagcaccttaagcagaaatca

SEQ ID NO: 2155 - DNA, 21 bp, Homo sapiens
  source 1..21: mol_type = genomic DNA
aagcccttcatccatttctct

SEQ ID NO: 2156 - DNA, 21 bp, Homo sapiens
  source 1..21: mol_type = genomic DNA
atcttggtgccatcttaaggt

SEQ ID NO: 2157 - DNA, 21 bp, Homo sapiens
  source 1..21: mol_type = genomic DNA
agcaaaccaatcgcaaactag

SEQ ID NO: 2158 - DNA, 22 bp, Homo sapiens
  source 1..22: mol_type = genomic DNA
aatcatcatcttcatcagctcg

SEQ ID NO: 2159 - DNA, 21 bp, Homo sapiens
  source 1..21: mol_type = genomic DNA
cctttcgccttgcttatatgg

SEQ ID NO: 2160 - DNA, 21 bp, Homo sapiens
  source 1..21: mol_type = genomic DNA
actactcaacagcctaccaaa

SEQ ID NO: 2161 - DNA, 21 bp, Homo sapiens
  source 1..21: mol_type = genomic DNA
tggagctgggaactttaatgt

SEQ ID NO: 2162 - DNA, 21 bp, Homo sapiens
  source 1..21: mol_type = genomic DNA
gaagagagagagaatgcgtgt

SEQ ID NO: 2163 - DNA, 21 bp, Homo sapiens
  source 1..21: mol_type = genomic DNA
gacatggatattctggtgcca

SEQ ID NO: 2164 - DNA, 21 bp, Homo sapiens
  source 1..21: mol_type = genomic DNA
ctgttgcaagatgacccaaat

SEQ ID NO: 2165 - DNA, 22 bp, Homo sapiens
  source 1..22: mol_type = genomic DNA
agatacacacacgttcacaaac

SEQ ID NO: 2166 - DNA, 21 bp, Homo sapiens
  source 1..21: mol_type = genomic DNA
gatggcaatgcttgataacga

SEQ ID NO: 2167 - DNA, 22 bp, Homo sapiens
  source 1..22: mol_type = genomic DNA
ttccatgaagttcctcaagact

SEQ ID NO: 2168 - DNA, 21 bp, Homo sapiens
  source 1..21: mol_type = genomic DNA
ccacccacataccctgaaatt

SEQ ID NO: 2169 - DNA, 20 bp, Homo sapiens
  source 1..20: mol_type = genomic DNA
gtaacacacggatgctgaag

SEQ ID NO: 2170 - DNA, 21 bp, Homo sapiens
  source 1..21: mol_type = genomic DNA
tggacacgaggctatttgtag

SEQ ID NO: 2171 - DNA, 21 bp, Homo sapiens
  source 1..21: mol_type = genomic DNA
ggcttaagaaggagagtggtt

SEQ ID NO: 2172 - DNA, 21 bp, Homo sapiens
  source 1..21: mol_type = genomic DNA
tagtttcctttggccttctcc

SEQ ID NO: 2173 - DNA, 21 bp, Homo sapiens
  source 1..21: mol_type = genomic DNA
ctagggttcccagttcacaaa

SEQ ID NO: 2174 - DNA, 21 bp, Homo sapiens
  source 1..21: mol_type = genomic DNA
gaaacaacattgagggcattg

SEQ ID NO: 2175 - DNA, 21 bp, Homo sapiens
  source 1..21: mol_type = genomic DNA
gagctctttgaagtagaagca

SEQ ID NO: 2176 - DNA, 20 bp, Homo sapiens
  source 1..20: mol_type = genomic DNA
ccattccaacaaagcttccg

SEQ ID NO: 2177 - DNA, 21 bp, Homo sapiens
  source 1..21: mol_type = genomic DNA
ctacttgccctattgtgtcga

SEQ ID NO: 2178 - DNA, 21 bp, Homo sapiens
  source 1..21: mol_type = genomic DNA
ccagggtgtttgaaggtagaa

SEQ ID NO: 2179 - DNA, 21 bp, Homo sapiens
  source 1..21: mol_type = genomic DNA
ctggaggtaagaaggaatgca

SEQ ID NO: 2180 - DNA, 20 bp, Homo sapiens
  source 1..20: mol_type = genomic DNA
atgtgggactctttgctctc

SEQ ID NO: 2181 - DNA, 21 bp, Homo sapiens
  source 1..21: mol_type = genomic DNA
atgaatacagctttgcatggc

SEQ ID NO: 2182 - DNA, 21 bp, Homo sapiens
  source 1..21: mol_type = genomic DNA
gttaaagcattcacagccctc

SEQ ID NO: 2183 - DNA, 21 bp, Homo sapiens
  source 1..21: mol_type = genomic DNA
ctgggacttgtctatcctcct

SEQ ID NO: 2184 - DNA, 21 bp, Homo sapiens
  source 1..21: mol_type = genomic DNA
atgtctgtccaagtgaacagt

SEQ ID NO: 2185 - DNA, 21 bp, Homo sapiens
  source 1..21: mol_type = genomic DNA
aaagtatccagacccagaacc

SEQ ID NO: 2186 - DNA, 21 bp, Homo sapiens
  source 1..21: mol_type = genomic DNA
ataggccagcactccaaataa

SEQ ID NO: 2187 - DNA, 21 bp, Homo sapiens
  source 1..21: mol_type = genomic DNA
caaatcaagtcccatggtagg

SEQ ID NO: 2188 - DNA, 21 bp, Homo sapiens
  source 1..21: mol_type = genomic DNA
ctttccgtctttataggcagc

SEQ ID NO: 2189 - DNA, 21 bp, Homo sapiens
  source 1..21: mol_type = genomic DNA
agaaatcgtgttcacagccta

SEQ ID NO: 2190 - DNA, 21 bp, Homo sapiens
  source 1..21: mol_type = genomic DNA
ccgtaaatgaagtggcttgaa

SEQ ID NO: 2191 - DNA, 21 bp, Homo sapiens
  source 1..21: mol_type = genomic DNA
cctttcttgcaaccttgagat

SEQ ID NO: 2192 - DNA, 21 bp, Homo sapiens
  source 1..21: mol_type = genomic DNA
ctctagatgctcaacctcagg

SEQ ID NO: 2193 - DNA, 21 bp, Homo sapiens
  source 1..21: mol_type = genomic DNA
aataacagtccaccagaacca

SEQ ID NO: 2194 - DNA, 21 bp, Homo sapiens
  source 1..21: mol_type = genomic DNA
tccaaggacctgcaaatgtta

SEQ ID NO: 2195 - DNA, 21 bp, Homo sapiens
  source 1..21: mol_type = genomic DNA
aggttacatcattcacccaca

SEQ ID NO: 2196 - DNA, 21 bp, Homo sapiens
  source 1..21: mol_type = genomic DNA
atgaagacaatgacatctgcg

SEQ ID NO: 2197 - DNA, 21 bp, Homo sapiens
  source 1..21: mol_type = genomic DNA
cacttgtcatggtttagggac

SEQ ID NO: 2198 - DNA, 21 bp, Homo sapiens
  source 1..21: mol_type = genomic DNA
acctccaccttattgcttcaa

SEQ ID NO: 2199 - DNA, 21 bp, Homo sapiens
  source 1..21: mol_type = genomic DNA
gaattgcaaaggatgggtagg

SEQ ID NO: 2200 - DNA, 21 bp, Homo sapiens
  source 1..21: mol_type = genomic DNA
ctgcattgtgagtccatgtaa

SEQ ID NO: 2201 - DNA, 21 bp, Homo sapiens
  source 1..21: mol_type = genomic DNA
tcctatcttcatccctcttcc

SEQ ID NO: 2202 - DNA, 21 bp, Homo sapiens
  source 1..21: mol_type = genomic DNA
ttccatttagcctcccatctg

SEQ ID NO: 2203 - DNA, 21 bp, Homo sapiens
  source 1..21: mol_type = genomic DNA
tagctttatgggccttgttct

SEQ ID NO: 2204 - DNA, 21 bp, Homo sapiens
  source 1..21: mol_type = genomic DNA
ccacctctcaaacccagattt

SEQ ID NO: 2205 - DNA, 22 bp, Homo sapiens
  source 1..22: mol_type = genomic DNA
gtcagcgtatttgggattgaat

SEQ ID NO: 2206 - DNA, 21 bp, Homo sapiens
  source 1..21: mol_type = genomic DNA
aaatctgccacccatttcttc

SEQ ID NO: 2207 - DNA, 21 bp, Homo sapiens
  source 1..21: mol_type = genomic DNA
tattctgagttctacccaggt

SEQ ID NO: 2208 - DNA, 21 bp, Homo sapiens
  source 1..21: mol_type = genomic DNA
tacatgagacccagaaacaga

SEQ ID NO: 2209 - DNA, 21 bp, Homo sapiens
  source 1..21: mol_type = genomic DNA
cttcttggcagactatcagga

SEQ ID NO: 2210 - DNA, 21 bp, Homo sapiens
  source 1..21: mol_type = genomic DNA
aagctgctaaatctgtaggga

SEQ ID NO: 2211 - DNA, 21 bp, Homo sapiens
  source 1..21: mol_type = genomic DNA
ctgaccagacctgttgactaa

SEQ ID NO: 2212 - DNA, 22 bp, Homo sapiens
  source 1..22: mol_type = genomic DNA
tgatatgttcagtttgcctacc

SEQ ID NO: 2213 - DNA, 20 bp, Homo sapiens
  source 1..20: mol_type = genomic DNA
agcttgagtttcttgctggg

SEQ ID NO: 2214 - DNA, 21 bp, Homo sapiens
  source 1..21: mol_type = genomic DNA
ttcccgcaaagtagaagctat

SEQ ID NO: 2215 - DNA, 21 bp, Homo sapiens
  source 1..21: mol_type = genomic DNA
aaacgcatacaaacaggagac

SEQ ID NO: 2216 - DNA, 21 bp, Homo sapiens
  source 1..21: mol_type = genomic DNA
cttctaaacccatcacctgct

SEQ ID NO: 2217 - DNA, 21 bp, Homo sapiens
  source 1..21: mol_type = genomic DNA
cacccaaactcacaggtacaa

SEQ ID NO: 2218 - DNA, 21 bp, Homo sapiens
  source 1..21: mol_type = genomic DNA
tgaattctgagatcgagagcc

SEQ ID NO: 2219 - DNA, 21 bp, Homo sapiens
  source 1..21: mol_type = genomic DNA
agattaactgttgcctcactg

SEQ ID NO: 2220 - DNA, 20 bp, Homo sapiens
  source 1..20: mol_type = genomic DNA
caagacagtgcattccatgg

SEQ ID NO: 2221 - DNA, 21 bp, Homo sapiens
  source 1..21: mol_type = genomic DNA
ccaaggaaagagttgagaagg

SEQ ID NO: 2222 - DNA, 21 bp, Homo sapiens
  source 1..21: mol_type = genomic DNA
tgagtgcagtcgataaggaag

SEQ ID NO: 2223 - DNA, 21 bp, Homo sapiens
  source 1..21: mol_type = genomic DNA
aacaccgagaaagagagagag

SEQ ID NO: 2224 - DNA, 21 bp, Homo sapiens
  source 1..21: mol_type = genomic DNA
tgtactgctttcgtcttatgc

SEQ ID NO: 2225 - DNA, 21 bp, Homo sapiens
  source 1..21: mol_type = genomic DNA
catattcgcactgtatagccg

SEQ ID NO: 2226 - DNA, 21 bp, Homo sapiens
  source 1..21: mol_type = genomic DNA
ctgatggattctctggtgtga

SEQ ID NO: 2227 - DNA, 21 bp, Homo sapiens
  source 1..21: mol_type = genomic DNA
tcaaggagaagagagagggta

SEQ ID NO: 2228 - DNA, 21 bp, Homo sapiens
  source 1..21: mol_type = genomic DNA
tctcccaaagcagacaaagac

SEQ ID NO: 2229 - DNA, 21 bp, Homo sapiens
  source 1..21: mol_type = genomic DNA
agtcagttgttacgtgcaaag

SEQ ID NO: 2230 - DNA, 21 bp, Homo sapiens
  source 1..21: mol_type = genomic DNA
aaaggtttgttcatcctccct

SEQ ID NO: 2231 - DNA, 21 bp, Homo sapiens
  source 1..21: mol_type = genomic DNA
acagagcacgcaatataggaa

SEQ ID NO: 2232 - DNA, 21 bp, Homo sapiens
  source 1..21: mol_type = genomic DNA
ctgcattcacccatgtacttt

SEQ ID NO: 2233 - DNA, 21 bp, Homo sapiens
  source 1..21: mol_type = genomic DNA
tccagccataccatgtctatc

SEQ ID NO: 2234 - DNA, 21 bp, Homo sapiens
  source 1..21: mol_type = genomic DNA
ctcactagggaagaacagcag

SEQ ID NO: 2235 - DNA, 22 bp, Homo sapiens
  source 1..22: mol_type = genomic DNA
tgctgggtctgagtgttataaa

SEQ ID NO: 2236 - DNA, 21 bp, Homo sapiens
  source 1..21: mol_type = genomic DNA
gttgtgtgaatggtgctgtta

SEQ ID NO: 2237 - DNA, 21 bp, Homo sapiens
  source 1..21: mol_type = genomic DNA
ggcccagaagactcttgtaat

SEQ ID NO: 2238 - DNA, 21 bp, Homo sapiens
  source 1..21: mol_type = genomic DNA
cgacctacatcagctaatggt

SEQ ID NO: 2239 - DNA, 22 bp, Homo sapiens
  source 1..22: mol_type = genomic DNA
aagggaagaataacaatggtgc

SEQ ID NO: 2240 - DNA, 21 bp, Homo sapiens
  source 1..21: mol_type = genomic DNA
atgggagtatgggagtaggaa

SEQ ID NO: 2241 - DNA, 20 bp, Homo sapiens
  source 1..20: mol_type = genomic DNA
ttggtggcttgcagagattt

SEQ ID NO: 2242 - DNA, 22 bp, Homo sapiens
  source 1..22: mol_type = genomic DNA
tcacacgatcatcatactcaca

SEQ ID NO: 2243 - DNA, 21 bp, Homo sapiens
  source 1..21: mol_type = genomic DNA
ggtagcagatgactagacgat

SEQ ID NO: 2244 - DNA, 21 bp, Homo sapiens
  source 1..21: mol_type = genomic DNA
acgcctctgtcatttcctaac

SEQ ID NO: 2245 - DNA, 21 bp, Homo sapiens
  source 1..21: mol_type = genomic DNA
cagttgactcaatggtgcaat

SEQ ID NO: 2246 - DNA, 21 bp, Homo sapiens
  source 1..21: mol_type = genomic DNA
ataggttacagattgccacgt

SEQ ID NO: 2247 - DNA, 21 bp, Homo sapiens
  source 1..21: mol_type = genomic DNA
gatgctgctatcaaaggaaca

SEQ ID NO: 2248 - DNA, 21 bp, Homo sapiens
  source 1..21: mol_type = genomic DNA
aagacaaagagatggaaggca

SEQ ID NO: 2249 - DNA, 21 bp, Homo sapiens
  source 1..21: mol_type = genomic DNA
aataccctcttcccttcctca

SEQ ID NO: 2250 - DNA, 22 bp, Homo sapiens
  source 1..22: mol_type = genomic DNA
ccaccgtcaatatttatcagct

SEQ ID NO: 2251 - DNA, 21 bp, Homo sapiens
  source 1..21: mol_type = genomic DNA
gcctcagtccaaatcttagat

SEQ ID NO: 2252 - DNA, 22 bp, Homo sapiens
  source 1..22: mol_type = genomic DNA
ccttaggattctcaaagagtgt

SEQ ID NO: 2253 - DNA, 22 bp, Homo sapiens
  source 1..22: mol_type = genomic DNA
gcagtacagattcttgaacagt

SEQ ID NO: 2254 - DNA, 22 bp, Homo sapiens
  source 1..22: mol_type = genomic DNA
agaggattagatgtcttgctgt

SEQ ID NO: 2255 - DNA, 21 bp, Homo sapiens
  source 1..21: mol_type = genomic DNA
tactgcaggcaattcaggtaa

SEQ ID NO: 2256 - DNA, 21 bp, Homo sapiens
  source 1..21: mol_type = genomic DNA
gaagaggtccagtaagtgagg

SEQ ID NO: 2257 - DNA, 21 bp, Homo sapiens
  source 1..21: mol_type = genomic DNA
ttgtgagtccttgtctccttg

SEQ ID NO: 2258 - DNA, 21 bp, Homo sapiens
  source 1..21: mol_type = genomic DNA
gacgactaagacattgcatca

SEQ ID NO: 2259 - DNA, 21 bp, Homo sapiens
  source 1..21: mol_type = genomic DNA
agaagtctctctccgttgttt

SEQ ID NO: 2260 - DNA, 21 bp, Homo sapiens
  source 1..21: mol_type = genomic DNA
cttatgtgcatcaactgtgct

SEQ ID NO: 2261 - DNA, 21 bp, Homo sapiens
  source 1..21: mol_type = genomic DNA
agtgtctctcagaatcaggac

SEQ ID NO: 2262 - DNA, 21 bp, Homo sapiens
  source 1..21: mol_type = genomic DNA
tttatttccctacgcaaagcc

SEQ ID NO: 2263 - DNA, 21 bp, Homo sapiens
  source 1..21: mol_type = genomic DNA
agcctttgatgactgagttga

SEQ ID NO: 2264 - DNA, 21 bp, Homo sapiens
  source 1..21: mol_type = genomic DNA
ttggtttctattctgcactgc

SEQ ID NO: 2265 - DNA, 21 bp, Homo sapiens
  source 1..21: mol_type = genomic DNA
ttagagcttgctagtatcggg

SEQ ID NO: 2266 - DNA, 21 bp, Homo sapiens
  source 1..21: mol_type = genomic DNA
gaaatcccaaactgcctgaaa

SEQ ID NO: 2267 - DNA, 21 bp, Homo sapiens
  source 1..21: mol_type = genomic DNA
atccttcttgtgaaccttcct

SEQ ID NO: 2268 - DNA, 22 bp, Homo sapiens
  source 1..22: mol_type = genomic DNA
accagatgcatgtgattaaagg

SEQ ID NO: 2269 - DNA, 21 bp, Homo sapiens
  source 1..21: mol_type = genomic DNA
gtgtactctaggctactgtca

SEQ ID NO: 2270 - DNA, 21 bp, Homo sapiens
  source 1..21: mol_type = genomic DNA
gtcagcagcaagtaaaggttc

SEQ ID NO: 2271 - DNA, 21 bp, Homo sapiens
  source 1..21: mol_type = genomic DNA
catctagtcaagggttccaca

SEQ ID NO: 2272 - DNA, 21 bp, Homo sapiens
  source 1..21: mol_type = genomic DNA
caagtcatgctccaaactgtt

SEQ ID NO: 2273 - DNA, 21 bp, Homo sapiens
  source 1..21: mol_type = genomic DNA
aggacttaggacaacagagaa

SEQ ID NO: 2274 - DNA, 21 bp, Homo sapiens
  source 1..21: mol_type = genomic DNA
tgcccaacaccatctctaata

SEQ ID NO: 2275 - DNA, 21 bp, Homo sapiens
  source 1..21: mol_type = genomic DNA
gccttcatcactcagaacttc

SEQ ID NO: 2276 - DNA, 21 bp, Homo sapiens
  source 1..21: mol_type = genomic DNA
agggtatctattctccggaca

SEQ ID NO: 2277 - DNA, 21 bp, Homo sapiens
  source 1..21: mol_type = genomic DNA
atttgcccaagtaagttccac

SEQ ID NO: 2278 - DNA, 21 bp, Homo sapiens
  source 1..21: mol_type = genomic DNA
tggaagtacatgggatgcatt

SEQ ID NO: 2279 - DNA, 21 bp, Homo sapiens
  source 1..21: mol_type = genomic DNA
cttgaagagttccaatgccaa

SEQ ID NO: 2280 - DNA, 21 bp, Homo sapiens
  source 1..21: mol_type = genomic DNA
cgctgctgtttaaatcgatca

SEQ ID NO: 2281 - DNA, 21 bp, Homo sapiens
  source 1..21: mol_type = genomic DNA
gctctgctttgctcaaattct

SEQ ID NO: 2282 - DNA, 22 bp, Homo sapiens
  source 1..22: mol_type = genomic DNA
tgagctccagaattagatgtgt

SEQ ID NO: 2283 - DNA, 22 bp, Homo sapiens
  source 1..22: mol_type = genomic DNA
aacacctcctttctcactacag

SEQ ID NO: 2284 - DNA, 20 bp, Homo sapiens
  source 1..20: mol_type = genomic DNA
acaaacttcattcaccgcag

SEQ ID NO: 2285 - DNA, 20 bp, Homo sapiens
  source 1..20: mol_type = genomic DNA
aactacgccacccaactaaa

SEQ ID NO: 2286 - DNA, 21 bp, Homo sapiens
  source 1..21: mol_type = genomic DNA
gcttcagtgtaaccatgactc

SEQ ID NO: 2287 - DNA, 22 bp, Homo sapiens
  source 1..22: mol_type = genomic DNA
tgcacaattaagctacttctcc

SEQ ID NO: 2288 - DNA, 21 bp, Homo sapiens
  source 1..21: mol_type = genomic DNA
caacaccaaacttgcctgaat

SEQ ID NO: 2289 - DNA, 21 bp, Homo sapiens
  source 1..21: mol_type = genomic DNA
tccacaatttctacagcaacc

SEQ ID NO: 2290 - DNA, 21 bp, Homo sapiens
  source 1..21: mol_type = genomic DNA
gtgtcatttgattggtgctct

SEQ ID NO: 2291 - DNA, 22 bp, Homo sapiens
  source 1..22: mol_type = genomic DNA
gggtgtttcagtaggttaggat

SEQ ID NO: 2292 - DNA, 21 bp, Homo sapiens
  source 1..21: mol_type = genomic DNA
tgggattctaatgtctggtgc

SEQ ID NO: 2293 - DNA, 18 bp, Homo sapiens
  source 1..18: mol_type = genomic DNA
agaggtggttggttggtt

SEQ ID NO: 2294 - DNA, 21 bp, Homo sapiens
  source 1..21: mol_type = genomic DNA
gggcatcctgtctgaaatatg

SEQ ID NO: 2295 - DNA, 21 bp, Homo sapiens
  source 1..21: mol_type = genomic DNA
aagaagcgcagatacagtaca

SEQ ID NO: 2296 - DNA, 21 bp, Homo sapiens
  source 1..21: mol_type = genomic DNA
cacagcaagtttgaacctagt

SEQ ID NO: 2297 - DNA, 21 bp, Homo sapiens
  source 1..21: mol_type = genomic DNA
agtgcaaatgatgacctgttg

SEQ ID NO: 2298 - DNA, 21 bp, Homo sapiens
  source 1..21: mol_type = genomic DNA
gaactgttgcatgagaggtac

SEQ ID NO: 2299 - DNA, 21 bp, Homo sapiens
  source 1..21: mol_type = genomic DNA
ctttgtccttctctgttgtgt

SEQ ID NO: 2300 - DNA, 22 bp, Homo sapiens
  source 1..22: mol_type = genomic DNA
tttcttctagagtccagaggtg

SEQ ID NO: 2301 - DNA, 21 bp, Homo sapiens
  source 1..21: mol_type = genomic DNA
attctcttctctcttccagcc

SEQ ID NO: 2302 - DNA, 21 bp, Homo sapiens
  source 1..21: mol_type = genomic DNA
tatggctttgctaccttgtca

SEQ ID NO: 2303 - DNA, 21 bp, Homo sapiens
  source 1..21: mol_type = genomic DNA
ctatttctctggctcttgacc

SEQ ID NO: 2304 - DNA, 21 bp, Homo sapiens
  source 1..21: mol_type = genomic DNA
ttcttaaacctctgtgtggct

SEQ ID NO: 2305 - DNA, 21 bp, Homo sapiens
  source 1..21: mol_type = genomic DNA
tggacaaacaagaactgggta

SEQ ID NO: 2306 - DNA, 21 bp, Homo sapiens
  source 1..21: mol_type = genomic DNA
ccatgatcactgaaaccaaca

SEQ ID NO: 2307 - DNA, 21 bp, Homo sapiens
  source 1..21: mol_type = genomic DNA
ccatatgccctgctctttaag

SEQ ID NO: 2308 - DNA, 21 bp, Homo sapiens
  source 1..21: mol_type = genomic DNA
gggtggacaaagcaattcaaa

SEQ ID NO: 2309 - DNA, 22 bp, Homo sapiens
  source 1..22: mol_type = genomic DNA
cagcattcaattcatccttgtg

SEQ ID NO: 2310 - DNA, 21 bp, Homo sapiens
  source 1..21: mol_type = genomic DNA
aagtagaagcaagccctgaat

SEQ ID NO: 2311 - DNA, 22 bp, Homo sapiens
  source 1..22: mol_type = genomic DNA
gtgtggtagggatgagaattat

SEQ ID NO: 2312 - DNA, 20 bp, Homo sapiens
  source 1..20: mol_type = genomic DNA
tcaggtaagcttccctccac

SEQ ID NO: 2313 - DNA, 21 bp, Homo sapiens
  source 1..21: mol_type = genomic DNA
actggttgtagaaaggacctc

SEQ ID NO: 2314 - DNA, 21 bp, Homo sapiens
  source 1..21: mol_type = genomic DNA
agtaagaggccagaagtcaga

SEQ ID NO: 2315 - DNA, 21 bp, Homo sapiens
  source 1..21: mol_type = genomic DNA
gcagtgcaggcctatatatag

SEQ ID NO: 2316 - DNA, 21 bp, Homo sapiens
  source 1..21: mol_type = genomic DNA
aaatctctgagtcggccataa

SEQ ID NO: 2317 - DNA, 20 bp, Homo sapiens
  source 1..20: mol_type = genomic DNA
aggcatggcaaacttacttg

SEQ ID NO: 2318 - DNA, 21 bp, Homo sapiens
  source 1..21: mol_type = genomic DNA
catttcactttcgaggatggt

SEQ ID NO: 2319 - DNA, 21 bp, Homo sapiens
  source 1..21: mol_type = genomic DNA
gtcagactaaagtgaggacca

SEQ ID NO: 2320 - DNA, 21 bp, Homo sapiens
  source 1..21: mol_type = genomic DNA
ccagccctacctaaagtgaat

SEQ ID NO: 2321 - DNA, 21 bp, Homo sapiens
  source 1..21: mol_type = genomic DNA
ccctttcacaagactcttctc

SEQ ID NO: 2322 - DNA, 18 bp, Homo sapiens
  source 1..18: mol_type = genomic DNA
aaaaaaaaaaaaaaaaaa

SEQ ID NO: 2323 - DNA, 22 bp, Homo sapiens
  source 1..22: mol_type = genomic DNA
ccaaatgtagaacaggatcagc

SEQ ID NO: 2324 - DNA, 20 bp, Homo sapiens
  source 1..20: mol_type = genomic DNA
tagcagtaggtgtggctttc

SEQ ID NO: 2325 - DNA, 21 bp, Homo sapiens
  source 1..21: mol_type = genomic DNA
ttggattctcttggttgtgag

SEQ ID NO: 2326 - DNA, 22 bp, Homo sapiens
  source 1..22: mol_type = genomic DNA
caacgctttggtatagtttgtg

SEQ ID NO: 2327 - DNA, 21 bp, Homo sapiens
  source 1..21: mol_type = genomic DNA
ccaggtgccatcgttaaagaa

SEQ ID NO: 2328 - DNA, 18 bp, Homo sapiens
  source 1..18: mol_type = genomic DNA
aaaaaaaaaaaaaaaaaa

SEQ ID NO: 2329 - DNA, 22 bp, Homo sapiens
  source 1..22: mol_type = genomic DNA
ggataagtcaactaccatggtt

SEQ ID NO: 2330 - DNA, 21 bp, Homo sapiens
  source 1..21: mol_type = genomic DNA
aatggaattactcagctgtgg

SEQ ID NO: 2331 - DNA, 21 bp, Homo sapiens
  source 1..21: mol_type = genomic DNA
ggcagaaactgatagagactg

SEQ ID NO: 2332 - DNA, 21 bp, Homo sapiens
  source 1..21: mol_type = genomic DNA
accatgttctgagtacctctt

SEQ ID NO: 2333 - DNA, 23 bp, Homo sapiens
  source 1..23: mol_type = genomic DNA
agtcctgaatcaatgtctaacac

SEQ ID NO: 2334 - DNA, 20 bp, Homo sapiens
  source 1..20: mol_type = genomic DNA
tggtccctgtgctttgatat

SEQ ID NO: 2335 - DNA, 20 bp, Homo sapiens
  source 1..20: mol_type = genomic DNA
tggcttttctttcctcggta

SEQ ID NO: 2336 - DNA, 20 bp, Homo sapiens
  source 1..20: mol_type = genomic DNA
ccaaggctgctttaattcca

SEQ ID NO: 2337 - DNA, 20 bp, Homo sapiens
  source 1..20: mol_type = genomic DNA
caaactatcgctgaggacct

SEQ ID NO: 2338 - DNA, 20 bp, Homo sapiens
  source 1..20: mol_type = genomic DNA
gtctgctgccattgagttat

SEQ ID NO: 2339 - DNA, 20 bp, Homo sapiens
  source 1..20: mol_type = genomic DNA
gctcaccctctcttctctct

SEQ ID NO: 2340 - DNA, 20 bp, Homo sapiens
  source 1..20: mol_type = genomic DNA
acctgtttctcccagttaca

SEQ ID NO: 2341 - DNA, 20 bp, Homo sapiens
  source 1..20: mol_type = genomic DNA
gcccatgaaagagaaaccag

SEQ ID NO: 2342 - DNA, 20 bp, Homo sapiens
  source 1..20: mol_type = genomic DNA
ctccatcagtgcagaagtcc

SEQ ID NO: 2343 - DNA, 20 bp, Homo sapiens
  source 1..20: mol_type = genomic DNA
acagtcagcagccctaaaat

SEQ ID NO: 2344 - DNA, 20 bp, Homo sapiens
  source 1..20: mol_type = genomic DNA
gcctccttcacataatgcag

SEQ ID NO: 2345 - DNA, 20 bp, Homo sapiens
  source 1..20: mol_type = genomic DNA
ttgtcaacagagagtcagct

SEQ ID NO: 2346 - DNA, 20 bp, Homo sapiens
  source 1..20: mol_type = genomic DNA
ctgaaatggtctgggagtct

SEQ ID NO: 2347 - DNA, 20 bp, Homo sapiens
  source 1..20: mol_type = genomic DNA
tcaaagacagagtgagtgga

SEQ ID NO: 2348 - DNA, 21 bp, Homo sapiens
  source 1..21: mol_type = genomic DNA
tttgggggttacacttcatag

SEQ ID NO: 2349 - DNA, 21 bp, Homo sapiens
  source 1..21: mol_type = genomic DNA
agccagcagaataataccagg

SEQ ID NO: 2350 - DNA, 20 bp, Homo sapiens
  source 1..20: mol_type = genomic DNA
acctcatcttttgtcagcct

SEQ ID NO: 2351 - DNA, 20 bp, Homo sapiens
  source 1..20: mol_type = genomic DNA
acagttccataggcaggttt

SEQ ID NO: 2352 - DNA, 21 bp, Homo sapiens
  source 1..21: mol_type = genomic DNA
gcagttccagatccaatatgc

SEQ ID NO: 2353 - DNA, 20 bp, Homo sapiens
  source 1..20: mol_type = genomic DNA
tttgggaaagatgggagagc

SEQ ID NO: 2354 - DNA, 21 bp, Homo sapiens
  source 1..21: mol_type = genomic DNA
ttgcaggtaaggtacagaaga

SEQ ID NO: 2355 - DNA, 19 bp, Homo sapiens
  source 1..19: mol_type = genomic DNA
cttcagctgcatcttgagc

SEQ ID NO: 2356 - DNA, 20 bp, Homo sapiens
  source 1..20: mol_type = genomic DNA
ggcacttcaaaaacaaaccc

SEQ ID NO: 2357 - DNA, 20 bp, Homo sapiens
  source 1..20: mol_type = genomic DNA
agggttttatggtctcctgg

SEQ ID NO: 2358 - DNA, 21 bp, Homo sapiens
  source 1..21: mol_type = genomic DNA
tcaacacggagaactgaaaac

SEQ ID NO: 2359 - DNA, 22 bp, Homo sapiens
  source 1..22: mol_type = genomic DNA
tccgtgtaaatgaacaaagcac

SEQ ID NO: 2360 - DNA, 20 bp, Homo sapiens
  source 1..20: mol_type = genomic DNA
ttcagggaatggtttgcatt

SEQ ID NO: 2361 - DNA, 20 bp, Homo sapiens
  source 1..20: mol_type = genomic DNA
gagatgccattcccaaaagg

SEQ ID NO: 2362 - DNA, 20 bp, Homo sapiens
  source 1..20: mol_type = genomic DNA
ccctaccatagtgccagatg

SEQ ID NO: 2363 - DNA, 20 bp, Homo sapiens
  source 1..20: mol_type = genomic DNA
cagctttcagtgacagagga

SEQ ID NO: 2364 - DNA, 20 bp, Homo sapiens
  source 1..20: mol_type = genomic DNA
ccaaaggcagatgagtgttt

SEQ ID NO: 2365 - DNA, 20 bp, Homo sapiens
  source 1..20: mol_type = genomic DNA
gcctgggatagaaatgggaa

SEQ ID NO: 2366 - DNA, 20 bp, Homo sapiens
  source 1..20: mol_type = genomic DNA
ggaaaggaaaggaagctgtg

SEQ ID NO: 2367 - DNA, 20 bp, Homo sapiens
  source 1..20: mol_type = genomic DNA
tcagagaggtcttgctgaag

SEQ ID NO: 2368 - DNA, 21 bp, Homo sapiens
  source 1..21: mol_type = genomic DNA
tctctctgttgcttgtttcct

SEQ ID NO: 2369 - DNA, 20 bp, Homo sapiens
  source 1..20: mol_type = genomic DNA
cgcatgtggtagatcatcag

SEQ ID NO: 2370 - DNA, 20 bp, Homo sapiens
  source 1..20: mol_type = genomic DNA
tataacaccctcacctccca

SEQ ID NO: 2371 - DNA, 21 bp, Homo sapiens
  source 1..21: mol_type = genomic DNA
cacccaaatcaccttgctatg

SEQ ID NO: 2372 - DNA, 20 bp, Homo sapiens
  source 1..20: mol_type = genomic DNA
caactaccgtggattccgtt

SEQ ID NO: 2373 - DNA, 20 bp, Homo sapiens
  source 1..20: mol_type = genomic DNA
tctatcatgagtcgcttcca

SEQ ID NO: 2374 - DNA, 20 bp, Homo sapiens
  source 1..20: mol_type = genomic DNA
tttctgtcactttctgggct

SEQ ID NO: 2375 - DNA, 21 bp, Homo sapiens
  source 1..21: mol_type = genomic DNA
cgtgtgtttctagtgcattgt

SEQ ID NO: 2376 - DNA, 20 bp, Homo sapiens
  source 1..20: mol_type = genomic DNA
gggctcagagggaatatcag

SEQ ID NO: 2377 - DNA, 20 bp, Homo sapiens
  source 1..20: mol_type = genomic DNA
ccgacgaatggatgaaagac

SEQ ID NO: 2378 - DNA, 20 bp, Homo sapiens
  source 1..20: mol_type = genomic DNA
acccaaattccatgcctact

SEQ ID NO: 2379 - DNA, 20 bp, Homo sapiens
  source 1..20: mol_type = genomic DNA
tgtacagcagtctccagaaa

SEQ ID NO: 2380 - DNA, 20 bp, Homo sapiens
  source 1..20: mol_type = genomic DNA
gccctcttaccctttctcat

SEQ ID NO: 2381 - DNA, 21 bp, Homo sapiens
  source 1..21: mol_type = genomic DNA
cattcaaagatccagaccagg

SEQ ID NO: 2382 - DNA, 19 bp, Homo sapiens
  source 1..19: mol_type = genomic DNA
atctgtgattgctgccctc

SEQ ID NO: 2383 - DNA, 20 bp, Homo sapiens
  source 1..20: mol_type = genomic DNA
ctagaaactcccaggacaga

SEQ ID NO: 2384 - DNA, 20 bp, Homo sapiens
  source 1..20: mol_type = genomic DNA
catgtgtggaaaggattggt

SEQ ID NO: 2385 - DNA, 20 bp, Homo sapiens
  source 1..20: mol_type = genomic DNA
tatgaatgaaccgtggctca

SEQ ID NO: 2386 - DNA, 20 bp, Homo sapiens
  source 1..20: mol_type = genomic DNA
aagttgagtcgtttgtccca

SEQ ID NO: 2387 - DNA, 20 bp, Homo sapiens
  source 1..20: mol_type = genomic DNA
tagtgtttcaggagcgtgtt

SEQ ID NO: 2388 - DNA, 20 bp, Homo sapiens
  source 1..20: mol_type = genomic DNA
ccaggacaagcagacatttt

SEQ ID NO: 2389 - DNA, 21 bp, Homo sapiens
  source 1..21: mol_type = genomic DNA
gctgctggtgatttttgaaga

SEQ ID NO: 2390 - DNA, 20 bp, Homo sapiens
  source 1..20: mol_type = genomic DNA
ctctgggcaaacaagaaacc

SEQ ID NO: 2391 - DNA, 20 bp, Homo sapiens
  source 1..20: mol_type = genomic DNA
gtgtgtgtttgtggaagtgt

SEQ ID NO: 2392 - DNA, 21 bp, Homo sapiens
  source 1..21: mol_type = genomic DNA
aaagcccaatctctctggtta

SEQ ID NO: 2393 - DNA, 20 bp, Homo sapiens
  source 1..20: mol_type = genomic DNA
taggcgggcttattgtgttt

SEQ ID NO: 2394 - DNA, 20 bp, Homo sapiens
  source 1..20: mol_type = genomic DNA
tcaatgtaaactgcccggag

SEQ ID NO: 2395 - DNA, 21 bp, Homo sapiens
  source 1..21: mol_type = genomic DNA
atgggagtcgaatggtgtaaa

SEQ ID NO: 2396 - DNA, 20 bp, Homo sapiens
  source 1..20: mol_type = genomic DNA
taacatttgagggcatggga

SEQ ID NO: 2397 - DNA, 20 bp, Homo sapiens
  source 1..20: mol_type = genomic DNA
cagaataccctcactgtgct

SEQ ID NO: 2398 - DNA, 20 bp, Homo sapiens
  source 1..20: mol_type = genomic DNA
ggagataacagcagaggtcc

SEQ ID NO: 2399 - DNA, 20 bp, Homo sapiens
  source 1..20: mol_type = genomic DNA
tgtgggtgatatctgtgtct

SEQ ID NO: 2400 - DNA, 20 bp, Homo sapiens
  source 1..20: mol_type = genomic DNA
gccatcctgtaactgaatgc

SEQ ID NO: 2401 - DNA, 20 bp, Homo sapiens
  source 1..20: mol_type = genomic DNA
gtattttccctttgccgcag

SEQ ID NO: 2402 - DNA, 20 bp, Homo sapiens
  source 1..20: mol_type = genomic DNA
attacagcaaagaacgtggc

SEQ ID NO: 2403 - DNA, 20 bp, Homo sapiens
  source 1..20: mol_type = genomic DNA
tctgtgtgttttgcattggt

SEQ ID NO: 2404 - DNA, 20 bp, Homo sapiens
  source 1..20: mol_type = genomic DNA
gtgacagttttccaaggcat

SEQ ID NO: 2405 - DNA, 20 bp, Homo sapiens
  source 1..20: mol_type = genomic DNA
gcattactttttcgcacact

SEQ ID NO: 2406 - DNA, 20 bp, Homo sapiens
  source 1..20: mol_type = genomic DNA
ggggattgttttaagcaggc

SEQ ID NO: 2407 - DNA, 20 bp, Homo sapiens
  source 1..20: mol_type = genomic DNA
ccattgttctcaccaactct

SEQ ID NO: 2408 - DNA, 19 bp, Homo sapiens
  source 1..19: mol_type = genomic DNA
cctgaaacacaagcagcag

SEQ ID NO: 2409 - DNA, 20 bp, Homo sapiens
  source 1..20: mol_type = genomic DNA
agctgcctatttgattggtg

SEQ ID NO: 2410 - DNA, 20 bp, Homo sapiens
  source 1..20: mol_type = genomic DNA
cagtacagtcagccttcctt

SEQ ID NO: 2411 - DNA, 20 bp, Homo sapiens
  source 1..20: mol_type = genomic DNA
tgcattcaaactaccccaag

SEQ ID NO: 2412 - DNA, 20 bp, Homo sapiens
  source 1..20: mol_type = genomic DNA
ccgaaaagaggcaagcaatt

SEQ ID NO: 2413 - DNA, 20 bp, Homo sapiens
  source 1..20: mol_type = genomic DNA
gtcacctcaacctaactcca

SEQ ID NO: 2414 - DNA, 20 bp, Homo sapiens
  source 1..20: mol_type = genomic DNA
gcaacagtctacccgtctag

SEQ ID NO: 2415 - DNA, 20 bp, Homo sapiens
  source 1..20: mol_type = genomic DNA
atcaatgctctgacctcctg

SEQ ID NO: 2416 - DNA, 21 bp, Homo sapiens
  source 1..21: mol_type = genomic DNA
atacatcaggcctccagaatt

SEQ ID NO: 2417 - DNA, 22 bp, Homo sapiens
  source 1..22: mol_type = genomic DNA
cacatctttagagctcaggtga

SEQ ID NO: 2418 - DNA, 21 bp, Homo sapiens
  source 1..21: mol_type = genomic DNA
ccatcacttcacaatccacac

SEQ ID NO: 2419 - DNA, 20 bp, Homo sapiens
  source 1..20: mol_type = genomic DNA
aatcctgcagtcatcttccc

SEQ ID NO: 2420 - DNA, 21 bp, Homo sapiens
  source 1..21: mol_type = genomic DNA
caagtctggtttgtgagaagc

SEQ ID NO: 2421 - DNA, 21 bp, Homo sapiens
  source 1..21: mol_type = genomic DNA
gggagcttctgtagtctttga

SEQ ID NO: 2422 - DNA, 21 bp, Homo sapiens
  source 1..21: mol_type = genomic DNA
taaggagagcaggacttacag

SEQ ID NO: 2423 - DNA, 21 bp, Homo sapiens
  source 1..21: mol_type = genomic DNA
ccaacggttcatttgtcgtat

SEQ ID NO: 2424 - DNA, 21 bp, Homo sapiens
  source 1..21: mol_type = genomic DNA
ccttgctctgttaatgggttt

SEQ ID NO: 2425 - DNA, 21 bp, Homo sapiens
  source 1..21: mol_type = genomic DNA
aacaatgcttaacgggaatcc

SEQ ID NO: 2426 - DNA, 21 bp, Homo sapiens
  source 1..21: mol_type = genomic DNA
gcagagttcatagaagggtca

SEQ ID NO: 2427 - DNA, 21 bp, Homo sapiens
  source 1..21: mol_type = genomic DNA
aaaccgagacgaccacctaat

SEQ ID NO: 2428 - DNA, 21 bp, Homo sapiens
  source 1..21: mol_type = genomic DNA
gagtgatgatgagccatgatg

SEQ ID NO: 2429 - DNA, 21 bp, Homo sapiens
  source 1..21: mol_type = genomic DNA
ggatattggagatagcaggca

SEQ ID NO: 2430 - DNA, 21 bp, Homo sapiens
  source 1..21: mol_type = genomic DNA
gtttggcactgcaactagata

SEQ ID NO: 2431 - DNA, 21 bp, Homo sapiens
  source 1..21: mol_type = genomic DNA
tgaaataagggaagccacaca

SEQ ID NO: 2432 - DNA, 21 bp, Homo sapiens
  source 1..21: mol_type = genomic DNA
tccttagtgtgccaattagcc

SEQ ID NO: 2433 - DNA, 20 bp, Homo sapiens
  source 1..20: mol_type = genomic DNA
ttaatgtggagagacaggcc

SEQ ID NO: 2434 - DNA, 21 bp, Homo sapiens
  source 1..21: mol_type = genomic DNA
caatgcatcttactcaccctt

SEQ ID NO: 2435 - DNA, 21 bp, Homo sapiens
  source 1..21: mol_type = genomic DNA
agtatggaagtgggaattgga

SEQ ID NO: 2436 - DNA, 21 bp, Homo sapiens
  source 1..21: mol_type = genomic DNA
ttgcttccacagaaactcttc

SEQ ID NO: 2437 - DNA, 21 bp, Homo sapiens
  source 1..21: mol_type = genomic DNA
aaccgacctattccaaagtct

SEQ ID NO: 2438 - DNA, 21 bp, Homo sapiens
  source 1..21: mol_type = genomic DNA
tgtgaagcgaatacagctcaa

SEQ ID NO: 2439 - DNA, 21 bp, Homo sapiens
  source 1..21: mol_type = genomic DNA
gttctaactacaccaggctct

SEQ ID NO: 2440 - DNA, 21 bp, Homo sapiens
  source 1..21: mol_type = genomic DNA
gtatgagtgtaggtgtggagg

SEQ ID NO: 2441 - DNA, 21 bp, Homo sapiens
  source 1..21: mol_type = genomic DNA
aatctggatctagcgaaggac

SEQ ID NO: 2442 - DNA, 21 bp, Homo sapiens
  source 1..21: mol_type = genomic DNA
taatgagaaggcaggatgagg

SEQ ID NO: 2443 - DNA, 21 bp, Homo sapiens
  source 1..21: mol_type = genomic DNA
aagacaactctctaggcctca

SEQ ID NO: 2444 - DNA, 21 bp, Homo sapiens
  source 1..21: mol_type = genomic DNA
gtttatggttgtccctggaga

SEQ ID NO: 2445 - DNA, 21 bp, Homo sapiens
  source 1..21: mol_type = genomic DNA
tccaccttctgatcacacaat

SEQ ID NO: 2446 - DNA, 21 bp, Homo sapiens
  source 1..21: mol_type = genomic DNA
aagatcaggtaccaaggcatt

SEQ ID NO: 2447 - DNA, 21 bp, Homo sapiens
  source 1..21: mol_type = genomic DNA
atgatgtgaagtccatggtga

SEQ ID NO: 2448 - DNA, 21 bp, Homo sapiens
  source 1..21: mol_type = genomic DNA
tccaaattgacttccatgagc

SEQ ID NO: 2449 - DNA, 21 bp, Homo sapiens
  source 1..21: mol_type = genomic DNA
gtggtttcaggaatttggagg

SEQ ID NO: 2450 - DNA, 22 bp, Homo sapiens
  source 1..22: mol_type = genomic DNA
tatttgctgcttcattcttccc

SEQ ID NO: 2451 - DNA, 21 bp, Homo sapiens
  source 1..21: mol_type = genomic DNA
aagtcattacgtcccacactg

SEQ ID NO: 2452 - DNA, 21 bp, Homo sapiens
  source 1..21: mol_type = genomic DNA
aaagtcatcagaagggtagca

SEQ ID NO: 2453 - DNA, 21 bp, Homo sapiens
  source 1..21: mol_type = genomic DNA
aatgatgccgaacagtgagta

SEQ ID NO: 2454 - DNA, 21 bp, Homo sapiens
  source 1..21: mol_type = genomic DNA
aatgtaagacagggacagaga

SEQ ID NO: 2455 - DNA, 21 bp, Homo sapiens
  source 1..21: mol_type = genomic DNA
tgaattccacagtccagtcaa

SEQ ID NO: 2456 - DNA, 21 bp, Homo sapiens
  source 1..21: mol_type = genomic DNA
aatgccttcaaagacagtgac

SEQ ID NO: 2457 - DNA, 21 bp, Homo sapiens
  source 1..21: mol_type = genomic DNA
cacacctgcaattgagatgaa

SEQ ID NO: 2458 - DNA, 21 bp, Homo sapiens
  source 1..21: mol_type = genomic DNA
gtcatgatgatgcaacagcta

SEQ ID NO: 2459 - DNA, 21 bp, Homo sapiens
  source 1..21: mol_type = genomic DNA
tttcacggtaagaggagcaaa

SEQ ID NO: 2460 - DNA, 21 bp, Homo sapiens
  source 1..21: mol_type = genomic DNA
ttctctctaggcaggtgaact

SEQ ID NO: 2461 - DNA, 21 bp, Homo sapiens
  source 1..21: mol_type = genomic DNA
accctttgaaagaaccaggaa

SEQ ID NO: 2462 - DNA, 21 bp, Homo sapiens
  source 1..21: mol_type = genomic DNA
aatgagccactgttctctagg

SEQ ID NO: 2463 - DNA, 21 bp, Homo sapiens
  source 1..21: mol_type = genomic DNA
atttgcacattagggcctcaa

SEQ ID NO: 2464 - DNA, 20 bp, Homo sapiens
  source 1..20: mol_type = genomic DNA
gaacttccctgcttccttct

SEQ ID NO: 2465 - DNA, 21 bp, Homo sapiens
  source 1..21: mol_type = genomic DNA
aaatacttggctgtgaccatg

SEQ ID NO: 2466 - DNA, 21 bp, Homo sapiens
  source 1..21: mol_type = genomic DNA
aagacccttgagaacttccaa

SEQ ID NO: 2467 - DNA, 21 bp, Homo sapiens
  source 1..21: mol_type = genomic DNA
atgtgtaaagacgtcctggaa

SEQ ID NO: 2468 - DNA, 21 bp, Homo sapiens
  source 1..21: mol_type = genomic DNA
tctatgtggagggatttgaca

SEQ ID NO: 2469 - DNA, 22 bp, Homo sapiens
  source 1..22: mol_type = genomic DNA
ttcctgaagtttatggtgcaac

SEQ ID NO: 2470 - DNA, 21 bp, Homo sapiens
  source 1..21: mol_type = genomic DNA
aaggttgaatgaggatcaagc

SEQ ID NO: 2471 - DNA, 21 bp, Homo sapiens
  source 1..21: mol_type = genomic DNA
gagggaagaacacaacacatg

SEQ ID NO: 2472 - DNA, 21 bp, Homo sapiens
  source 1..21: mol_type = genomic DNA
cagactagcctacaatcctcc

SEQ ID NO: 2473 - DNA, 21 bp, Homo sapiens
  source 1..21: mol_type = genomic DNA
cattcaggttcttaagggctg

SEQ ID NO: 2474 - DNA, 21 bp, Homo sapiens
  source 1..21: mol_type = genomic DNA
gaaaggcagacgatgaaagag

SEQ ID NO: 2475 - DNA, 21 bp, Homo sapiens
  source 1..21: mol_type = genomic DNA
atctccatcagcacaggaatt

SEQ ID NO: 2476 - DNA, 21 bp, Homo sapiens
  source 1..21: mol_type = genomic DNA
gcagtgtgacatctgtgaatg

SEQ ID NO: 2477 - DNA, 21 bp, Homo sapiens
  source 1..21: mol_type = genomic DNA
agactttcctgttcctcttca

SEQ ID NO: 2478 - DNA, 21 bp, Homo sapiens
  source 1..21: mol_type = genomic DNA
tttacaatgaactagccaggc

SEQ ID NO: 2479 - DNA, 21 bp, Homo sapiens
  source 1..21: mol_type = genomic DNA
taacatctgcctgaaagcttc

SEQ ID NO: 2480 - DNA, 21 bp, Homo sapiens
  source 1..21: mol_type = genomic DNA
ctcgtgtgtgcaatttggaat

SEQ ID NO: 2481 - DNA, 21 bp, Homo sapiens
  source 1..21: mol_type = genomic DNA
ggagagatggagaagaccttt

SEQ ID NO: 2482 - DNA, 21 bp, Homo sapiens
  source 1..21: mol_type = genomic DNA
aatgtattactgtgctcccgt

SEQ ID NO: 2483 - DNA, 21 bp, Homo sapiens
  source 1..21: mol_type = genomic DNA
accacctgccactgtataaat

SEQ ID NO: 2484 - DNA, 21 bp, Homo sapiens
  source 1..21: mol_type = genomic DNA
aattcttcttctggtgcaagg

SEQ ID NO: 2485 - DNA, 21 bp, Homo sapiens
  source 1..21: mol_type = genomic DNA
ttgccctttgaactgttgatc

SEQ ID NO: 2486 - DNA, 21 bp, Homo sapiens
  source 1..21: mol_type = genomic DNA
aagcacactaaggcctgataa

SEQ ID NO: 2487 - DNA, 21 bp, Homo sapiens
  source 1..21: mol_type = genomic DNA
tcagtatccattcagcatcca

SEQ ID NO: 2488 - DNA, 20 bp, Homo sapiens
  source 1..20: mol_type = genomic DNA
taaccgaagcccatactctg

SEQ ID NO: 2489 - DNA, 21 bp, Homo sapiens
  source 1..21: mol_type = genomic DNA
tccttactccagatacccgat

SEQ ID NO: 2490 - DNA, 21 bp, Homo sapiens
  source 1..21: mol_type = genomic DNA
tctggcttctttcttggagag

SEQ ID NO: 2491 - DNA, 21 bp, Homo sapiens
  source 1..21: mol_type = genomic DNA
gcaacattcatttcatcctgc

SEQ ID NO: 2492 - DNA, 21 bp, Homo sapiens
  source 1..21: mol_type = genomic DNA
catcacgacatccatttccac

SEQ ID NO: 2493 - DNA, 21 bp, Homo sapiens
  source 1..21: mol_type = genomic DNA
gtggttattatcggtgggtga

SEQ ID NO: 2494 - DNA, 20 bp, Homo sapiens
  source 1..20: mol_type = genomic DNA
ctgccattccttgtttccaa

SEQ ID NO: 2495 - DNA, 20 bp, Homo sapiens
  source 1..20: mol_type = genomic DNA
atttggacttgaagcagcct

SEQ ID NO: 2496 - DNA, 21 bp, Homo sapiens
  source 1..21: mol_type = genomic DNA
ctgtattctttgtccaccacc

SEQ ID NO: 2497 - DNA, 21 bp, Homo sapiens
  source 1..21: mol_type = genomic DNA
gacaggacaccttggattgat

SEQ ID NO: 2498 - DNA, 20 bp, Homo sapiens
  source 1..20: mol_type = genomic DNA
gagtaattcccccgatgcag

SEQ ID NO: 2499 - DNA, 21 bp, Homo sapiens
  source 1..21: mol_type = genomic DNA
tgagaatcattgagccaaacc

SEQ ID NO: 2500 - DNA, 20 bp, Homo sapiens
  source 1..20: mol_type = genomic DNA
aattgtgagcgttagagtgc

SEQ ID NO: 2501 - DNA, 21 bp, Homo sapiens
  source 1..21: mol_type = genomic DNA
ccagtgggtcttaacattgag

SEQ ID NO: 2502 - DNA, 20 bp, Homo sapiens
  source 1..20: mol_type = genomic DNA
aaaaggctagtagagggtgc

SEQ ID NO: 2503 - DNA, 20 bp, Homo sapiens
  source 1..20: mol_type = genomic DNA
tcgctgaagaactgagacac

SEQ ID NO: 2504 - DNA, 20 bp, Homo sapiens
  source 1..20: mol_type = genomic DNA
gggaagtgattggagagagg

SEQ ID NO: 2505 - DNA, 20 bp, Homo sapiens
  source 1..20: mol_type = genomic DNA
ccgcttggtatagagtgctg

SEQ ID NO: 2506 - DNA, 20 bp, Homo sapiens
  source 1..20: mol_type = genomic DNA
ttgaggttgtcaggaaagct

SEQ ID NO: 2507 - DNA, 20 bp, Homo sapiens
  source 1..20: mol_type = genomic DNA
tcttgggaaagggtcattct

SEQ ID NO: 2508 - DNA, 19 bp, Homo sapiens
  source 1..19: mol_type = genomic DNA
tctcttccatgcactccac

SEQ ID NO: 2509 - DNA, 19 bp, Homo sapiens
  source 1..19: mol_type = genomic DNA
gatctgaccctctgctcac

SEQ ID NO: 2510 - DNA, 20 bp, Homo sapiens
  source 1..20: mol_type = genomic DNA
cctgaaagatgcatggttgg

SEQ ID NO: 2511 - DNA, 20 bp, Homo sapiens
  source 1..20: mol_type = genomic DNA
gccacagaacaaccagattc

SEQ ID NO: 2512 - DNA, 20 bp, Homo sapiens
  source 1..20: mol_type = genomic DNA
tggggttaagagctcaagag

SEQ ID NO: 2513 - DNA, 20 bp, Homo sapiens
  source 1..20: mol_type = genomic DNA
agtgtggatgacttctgcaa

SEQ ID NO: 2514 - DNA, 20 bp, Homo sapiens
  source 1..20: mol_type = genomic DNA
gccccattatcctcctttgt

SEQ ID NO: 2515 - DNA, 21 bp, Homo sapiens
  source 1..21: mol_type = genomic DNA
caaatcagacccactaagcac

SEQ ID NO: 2516 - DNA, 20 bp, Homo sapiens
  source 1..20: mol_type = genomic DNA
tgttttggactgcttcactc

SEQ ID NO: 2517 - DNA, 21 bp, Homo sapiens
  source 1..21: mol_type = genomic DNA
attatcatgctcactcctcca

SEQ ID NO: 2518 - DNA, 19 bp, Homo sapiens
  source 1..19: mol_type = genomic DNA
gacatagcacgggagagta

SEQ ID NO: 2519 - DNA, 20 bp, Homo sapiens
  source 1..20: mol_type = genomic DNA
gctagtggcgttttaggaaa

SEQ ID NO: 2520 - DNA, 19 bp, Homo sapiens
  source 1..19: mol_type = genomic DNA
tcgcttggaagtcatagcc

SEQ ID NO: 2521 - DNA, 23 bp, Homo sapiens
  source 1..23: mol_type = genomic DNA
cagagctgctttgaagataatcc

SEQ ID NO: 2522 - DNA, 20 bp, Homo sapiens
  source 1..20: mol_type = genomic DNA
gaagcctgatagatgtgcct

SEQ ID NO: 2523 - DNA, 20 bp, Homo sapiens
  source 1..20: mol_type = genomic DNA
tacctctgcctccaattgtc

SEQ ID NO: 2524 - DNA, 20 bp, Homo sapiens
  source 1..20: mol_type = genomic DNA
cccatgtagacaaagtgctt

SEQ ID NO: 2525 - DNA, 20 bp, Homo sapiens
  source 1..20: mol_type = genomic DNA
ggcaggtttgtcttacagtt

SEQ ID NO: 2526 - DNA, 20 bp, Homo sapiens
  source 1..20: mol_type = genomic DNA
tgtgagattgcattcccctt

SEQ ID NO: 2527 - DNA, 20 bp, Homo sapiens
  source 1..20: mol_type = genomic DNA
cgggtcagagaaagatcagg

SEQ ID NO: 2528 - DNA, 22 bp, Homo sapiens
  source 1..22: mol_type = genomic DNA
aaacatttgtaaccactccctg

SEQ ID NO: 2529 - DNA, 21 bp, Homo sapiens
  source 1..21: mol_type = genomic DNA
cctgtaatatgggactcctgg

SEQ ID NO: 2530 - DNA, 20 bp, Homo sapiens
  source 1..20: mol_type = genomic DNA
ccaaaccacacacacaaact

SEQ ID NO: 2531 - DNA, 21 bp, Homo sapiens
  source 1..21: mol_type = genomic DNA
aggagaaggacatttcacagg

SEQ ID NO: 2532 - DNA, 20 bp, Homo sapiens
  source 1..20: mol_type = genomic DNA
aggccgataagacaaggttc

SEQ ID NO: 2533 - DNA, 19 bp, Homo sapiens
  source 1..19: mol_type = genomic DNA
gtttcccatagagccctgg

SEQ ID NO: 2534 - DNA, 20 bp, Homo sapiens
  source 1..20: mol_type = genomic DNA
ctccactctctccaaccaac

SEQ ID NO: 2535 - DNA, 20 bp, Homo sapiens
  source 1..20: mol_type = genomic DNA
aaactgtgaaaggacgagga

SEQ ID NO: 2536 - DNA, 20 bp, Homo sapiens
  source 1..20: mol_type = genomic DNA
tcccttgcttttgtaccagg

SEQ ID NO: 2537 - DNA, 20 bp, Homo sapiens
  source 1..20: mol_type = genomic DNA
catgtgtgtactgtgcctca

SEQ ID NO: 2538 - DNA, 21 bp, Homo sapiens
  source 1..21: mol_type = genomic DNA
tctttcactgtcactatgggg

SEQ ID NO: 2539 - DNA, 20 bp, Homo sapiens
  source 1..20: mol_type = genomic DNA
aaatgcagcttcccaacatc

SEQ ID NO: 2540 - DNA, 20 bp, Homo sapiens
  source 1..20: mol_type = genomic DNA
gagactttctggaggacgaa

SEQ ID NO: 2541 - DNA, 22 bp, Homo sapiens
  source 1..22: mol_type = genomic DNA
gaaacgtaatttagtgactggc

SEQ ID NO: 2542 - DNA, 22 bp, Homo sapiens
  source 1..22: mol_type = genomic DNA
atgtgtctattgctacctgtga

SEQ ID NO: 2543 - DNA, 20 bp, Homo sapiens
  source 1..20: mol_type = genomic DNA
ctccttcattttgctggtgg

SEQ ID NO: 2544 - DNA, 20 bp, Homo sapiens
  source 1..20: mol_type = genomic DNA
ggtgatcatttgtctgcaca

SEQ ID NO: 2545 - DNA, 20 bp, Homo sapiens
  source 1..20: mol_type = genomic DNA
tgaagggatgaaggcagaag

SEQ ID NO: 2546 - DNA, 20 bp, Homo sapiens
  source 1..20: mol_type = genomic DNA
attgtgttgtccttccgttt

SEQ ID NO: 2547 - DNA, 20 bp, Homo sapiens
  source 1..20: mol_type = genomic DNA
ctgaagcatcactggcattg

SEQ ID NO: 2548 - DNA, 20 bp, Homo sapiens
  source 1..20: mol_type = genomic DNA
aagcttgtagtctgggtagc

SEQ ID NO: 2549 - DNA, 22 bp, Homo sapiens
  source 1..22: mol_type = genomic DNA
tccctctgtactatgtagcatg

SEQ ID NO: 2550 - DNA, 20 bp, Homo sapiens
  source 1..20: mol_type = genomic DNA
ttcatttccctttgttgccc

1.-40. (canceled)

41. A method of determining the status of a genetic condition, the method comprising:
(a) preparing a sequencing library from a sample of DNA;
(b) hybridizing the sequencing library to a pool of TArget Capture Sequences (TACS), wherein the pool of TACS comprises a plurality of sequences that bind to genomic sequences of interest including variant allele loci of interest associated with different genetic conditions, wherein:
(i) each member sequence within the pool of TACS is between 100-500 base pairs in length, each member sequence having a 5′ end and a 3′ end;
(ii) each member sequence binds to the same genomic sequence of interest at least 50 base pairs away, on both the 5′ end and the 3′ end, from regions harboring Copy Number Variations (CNVs), Segmental duplications or repetitive DNA elements; and
(iii) the GC content of the pool of TACS is between 19% and 80%, as determined by calculating the GC content of each member within the pool of TACS;
(c) isolating members of the sequencing library that bind to the pool of TACS to obtain an enriched library;
(d) amplifying and sequencing the enriched library; and performing statistical analysis on the enriched library sequences to thereby determine the carrier status at the loci of interest associated with different genetic conditions.

42. The method of claim 41, wherein the pool of TACS comprises a plurality of TACS families directed to different genomic sequences of interest, wherein each TACS family comprises a plurality of member sequences, wherein each member sequence binds to the same genomic sequence of interest but has different start and/or stop positions with respect to a reference coordinate system for the genomic sequence of interest.

43. The method of claim 41, wherein the pool of TACS is fixed to a solid support.

44. The method of claim 41, wherein the TACS are biotinylated and are bound to streptavidin-coated magnetic beads.

45. The method of claim 41, wherein the pool of TACS comprises at least 2 different TACS families.

46. The method of claim 42, wherein each TACS family comprises at least 2 member sequences.

47. The method of claim 42, wherein the start and/or stop positions with respect to a reference coordinate system for the genomic sequence of interest are staggered by at least 3 base pairs.

48. The method of claim 41, wherein the genetic condition is selected from the group consisting of disease condition, a hereditary disease condition, and a chronic disease condition.

49. The method of claim 42, wherein the start and/or stop positions for the member sequences within a TACS family are listed in table 1.

50. The method of claim 41, where the genetic condition is selected from a group comprising Achondroplasia, Alpha-1 Antitrypsin Deficiency, Antiphospholipid Syndrome, Autism, Autosomal Dominant Polycystic Kidney Disease, Autosomal, Recessive Polycystic Kidney Disease, Inheritable Breast Cancer Gene, Charcot-Marie-Tooth, Inheritable Colon Cancer Gene, Crohn's Disease, Cystic Fibrosis, Dercum Disease, Duane Syndrome, Duchenne Muscular Dystrophy, Factor V Leiden Thrombophilia, Familial Hypercholesterolemia, Familial Mediterranean Fever, Fragile X Syndrome, Gaucher Disease, Hemochromatosis, Hemophilia, Holoprosencephaly, Huntington's Disease, Marfan Syndrome, Myotonic Dystrophy, Neurofibromatosis, Noonan Syndrome, Osteogenesis Imperfecta, Phenylketonuria, Poland Anomaly, Porphyria, Prostate Cancer, Retinitis Pigmentosa, Severe Combined Immunodeficiency (SCID), Sickle Cell Disease, Spinal Muscular Atrophy, Tay-Sachs, Thalassemia, WAGR Syndrome, Wilson Disease, and combinations thereof.

51. The method of claim 41, wherein the genetic condition is selected from a group comprising Abetalipoproteinemia; Arthrogryposis Mental Retardation Seizures; Autosomal recessive polycystic kidney disease; Bardet Biedl syndrome 12; Beta thalassemia; Canavan disease; Choreacanthocytosis; Crigler Najjar syndrome, Type I; Cystic fibrosis; Factor V Leiden thrombophilia; Factor XI deficiency; Familial dysautonomia; Familial Mediterranean fever; Fanconi anemia (FANCG-related); Glycine encephalopathy (GLDC-related); Glycogen storage disease, Type 3; Glycogen storage disease, Type 7; GRACILE Syndrome; Inclusion body myopathy, Type 2; Isovaleric acidemia; Joubert syndrome, Type 2; Junctional epidermolysis bullosa, Herlitz type; Leber congenital amaurosis (LCA5-related); Leydig cell hypoplasia [Luteinizing Hormone Resistance]; Limb girdle muscular dystrophy, Type 2E; Lipoamide Dehydrogenase Deficiency [Maple syrup urine disease, Type 3]; Lipoprotein lipase deficiency; Long chain 3-hydroxyacyl-CoA dehydrogenase deficiency; Maple syrup urine disease, Type IB; Methylmalonic acidemia (MMAA-related); Multiple sulfatase deficiency; Navajo neurohepatopathy [MPV17-related hepatocerebral mitochondrial DNA depletion syndrome]; Neuronal ceroid lipofuscinosis (MFSD8-related); Nijmegen breakage syndrome; Ornithine translocase deficiency [Hyperornithinemia-Hyperammonemia-Homocitrullinuria (HHH) Syndrome]; Peroxisome biogenesis disorders syndrome spectrum (PEX2-related); Phenylketonurea; Pontocerebellar hypoplasia, Type 2E; Pycnodysostosis; Pyruvate dehydrogenase deficiency (PDHB-related); Retinal Dystrophy (RLBPl-related) [Bothnia retinal dystrophy]; Retinitis pigmentosa (DHDDS-related); Sanfilippo syndrome, Type D [Mucopolysaccharidosis MID]; Sickle-cell disease; Sjogren-Larsson syndrome; Tay-Sachs disease; Usher syndrome, Type IF; 3 Methylcrotonyl CoA Carboxylase Deficiency 1; 3 Methylcrotonyl CoA Carboxylase Deficiency 2, and combinations thereof.

52. A kit comprising:
a) a container comprising the pool of TACS, wherein the pool of TACS comprises a plurality of TACS families, wherein each TACS family comprises a plurality of member sequences, wherein each member sequence binds to the same genomic sequence of interest but has different start and/or stop positions with respect to a reference coordinate system for the genomic sequence of interest, and further wherein:
(i) each member sequence within each TACS family is between 100-500 base pairs in length, each member sequence having a 5′ end and a 3′ end;
(ii) each member sequence binds to the same genomic sequence of interest at least 50 base pairs away, on both the 5′ end and the 3′ end, from regions harboring Copy Number Variations (CNVs), Segmental duplications or repetitive DNA elements; and
(iii) the GC content of the pool of TACS is between 19% and 80%, as determined by calculating the GC content of each member within each family of TACS and
b) instructions for using the pool of TACS in a method of determining the status of a genetic condition.

53. The kit of claim 52, further comprising one or more of the following:
(i) one or more components for isolating cell free DNA from a biological sample,
(ii) one or more components for preparing a sequencing library,
(iii) one or more components for amplifying and/or sequencing an enriched library, and/or
(iv) a software for performing a statistical analysis.

54. The kit of claim 52 for use in a method of determining the carrier status at the loci of interest associated with different genetic conditions.

55. The kit of claim 54, wherein the genetic condition is selected from the group consisting of disease condition, a hereditary disease condition, and a chronic disease condition.

56. The kit of claim 53 for use in a method of determining the carrier status at the loci of interest associated with different genetic conditions.

57. The kit of claim 56, wherein the genetic condition is selected from the group consisting of disease condition, a hereditary disease condition, and a chronic disease condition.
